United States Patent Application Publication US 2022/0339270 A1 - sequence listing, part 3

SEQ ID NO: 3363 - DNA, 2208 bp, Artificial Sequence
  source: /note="Description of Artificial Sequence: Synthetic polynucleotide"
atggctgccgatggttatcttccagattggctcgaggacactctctctgaaggaataagacagtggtggaagctcaaacctggcccaccaccgccaaagcccgcagagcggcataaggacgacagcaggggtcttacgcttcctgggtacaagtacctcggacccttcaacggactcgacaaaggagagccggtcaacgaggcagacgccgcggccctcgagcacgacaaggcctacgaccggcagctcgacagcggagacaacccgtacctcaagtacaaccacgccgacgcggagtttcaggagcgccttaaagaagatacgtcttttgggggcaacctcgcaagagcagtattccaggcgaaaaagagggttcttgaacctctgggcctggttgaggagcctgttaagacggctccgggaaaaaagaggccggtagagcactctcctgcggagctagattcctcctccggaactggaaagtcgggccaacagcctgcaagaaagagattgaattttggtcagactggagacgcagactccgtacctgacccccagcctctcggacagccaccagcagccccctctggtctgggaactaatacgatggcttcaggcagtggcgcaccaatggcagacaataacgagggcgccgacggagtgggtaattcctcgggaaattggcattgcgattccacatggatgggcgacagagtcatcaccaccagcacccgcacctgggctctgcccacctacaacaaccatctgtacaagcaaatttccagccagtctggggccagcaacgacaaccactactttggctacagcaccccttgggggtattttgacttcaacagattccactgccacttctccccacgtgactggcaaagactcatcaacaacaattggggattccggcccaaaagactcaacttcaagctctttaacattcaagtcaaggaggtcacgcagaatgacggtacgacgacgattgccaataaccttaccagcacggttcaggtgtttactgactcggagtaccagctcccgtacgtcctcggctcggcgcatcaaggatgcctcccgccgttcccagcagacgtcttcatggtgccacagtatggatacctcaccctgaacaacgggagtcaggcggtaggacgctcttcattttactgcctggagtactttccttctcagatgctgcgtaccggaaacaactttaccttcagctacacctttgaggacgttccttttcacagcagctacgctcatagccagagtttggaccgtctcatgaatcctctcatcgaccagtacctgtattacttgagcagaacaaacactccaagcggaaccactacgcagtccaggcttcagttttctcaagccggagcgagtgacattcgggaccagtctaggaactggcttcctggaccctgttaccgccagcagcgagtatcaaagacagctgcggacaacaacaacagtgattactcgtggactggagctaccaagtatcacctcaatggaagagactctctggtgaatccgggcacagccatggccagccacaaggacgatgaagaaaagtattttcctcagagcggggttctcatcttcggaaaacaagactcgggaaaaactaatgtggacattgaaaaggtcatgattacagacgaagaggaaatcaggaccaccaatcccgtggctacggagcagtatggttctgtatctaccaatctccagagcggcaacacacaagcagctacctcagatgtcaacacacaaggcgttcttccaggcatggtctggcaggacagagacgtgtacctgcagggacccatctgggcaaagattccacacacggacggacattttcacccttctcctcttatgggaggatttggaccgaagcaccctcccccgcagattctcatcaagaataccccggtacctgcgaatccttctaccaccttcagcgcggcaaagtttgcttccttcatcacacagtactccacggggcaggtcagcgtggagatcgagtgggagctgcagaaagagaacagcaaacgctggaaccccgagatccagtatacctccaactacaacaagtctgttaatgtggactttactgtggacactaatggcgtgtattcagagcctcgccccattggcacaagatacctgactcgtaatctgtaa

SEQ ID NO: 3364 - DNA, 2208 bp, Artificial Sequence
  source: /note="Description of Artificial Sequence: Synthetic polynucleotide"
atggctgccgatggttatcttccagattggctcgaggacactctctctgaaggaataagacagtggtggaagctcaaacctggcccaccaccgccaaagcccgcagagcggcataaggacgacagcaggggtcttgtgcttcctgggtacaagtacctcggacccttcaacggactcgacaaaggagagccggtcaacgaggcagacgccgcggccctcgagcacgacaaggcctacgaccggcagctcgacagcggagacaacccgtacctcaagtacaaccacgccgacgcggagtttcaggagcgccttaaagaagatacgtcttttgggggcaacctcgcaagagcagtattccaggcgaaaaagagggttcttgaacctctgggcctggttgaggagcctgttaagacggctccgggaaaaaagaggccggtagagcactctcctgcggagccagattcctcctccggaactggagagtcgggccaacagcctgcaagaaagagattgaattttggtcagactggagacgcagactccgtacctgacccccagcctctcggacagccaccagcagccccctctggtctgggaactaatacgatggcttcaggcagtggcgcaccaatggcagacaataacgagggcgccgacggagtgggtaattcctcgggaaattggcattgcgattccacatggatgggcgacagagtcatcaccaccagcacccgcacctgggctctgcccacctacaacaaccatctgtacaagcaaatttccagccagtctggagccagcaacgacaaccactactttggctacagcaccccttgggggtattttgacttcaacagattccactgccacttctccccacgtgactggcaaagactcatcaacaacaattggggattccggcccaaaagactcaacttcaagctctttaacattcaagtcaaggaggtcacgcagaatgacggtacgacgacgattgccaataaccttaccagcacggttcaggtgtttactgactcggagtaccagctcccgtacgtcctcggctcggcgcatcaaggatgcctcccgccgttcccagcagacgtcttcatggtgccacagtatggatacctcaccctgaacaacgggagtcaggcggtaggacgctcttcattttactgcctggagtactttccttctcagatgctgcgtaccggaaacaactttaccttcagctacacctttgaggacgttccttttcacagcagctacgctcacagccagagtttggaccgtcttatgaatcctctcatcgaccagtacctgtattacttgagcagaacaaacactccaagcggaaccactacgcagtccaggcttcagttttctcaagccggagcgagtgacattcgggaccagtctaggaactggcttcctggaccctgttaccgccagcagcgagtatcaaagacagctgcggacaacaacaacagtgattactcgtggactggagctaccaagtatcacctcaatggaagagactctctggtgaatccgggcacagccatggccagccacaaggacgatgaagaaaagtattttcctcagagcggggttctcatcttcggaaaacaagactcgggaaaaactaatgtggacattgaaaaggtcatgattacagacgaagaggaaatcaggaccaccaatcccgtggctacggagcagtatggttctgtatctaccaatctccagagcggcaacacacaagcagctacctcagatgtcaacacacaaggcgttcttccaggcatggtccggcaggacagagacgtgtacctgcagggacccatctgggcaaagattccacacacggacggacattttcacccttctcctcttatgggaggatttggactgaagcaccctcccccgcagattctcatcaagaataccccggtacctgcgaatccttctaccaccttcagcgcggcaaagtttgcttccttcatcacacagtactccacggggcaggtcagcgtggagatcgagtgggagccgcagaaagagaacagcaaacgctggaaccccgagatccagtatacctccaactacaacaagtctgttaatgtggactttactgtggacactaatggcgtgtattcagagcctcgccccattggcacaagatacctgactcgtaatctgtaa

SEQ ID NO: 3365 - DNA, 2208 bp, Artificial Sequence
  source: /note="Description of Artificial Sequence: Synthetic polynucleotide"
atggctgccgatggttatcttccagattggctcgaggacactctctctgaaggaataagacagtggtggaagctcaaacctggcccaccaccgccaaagcccgcagagcggcataaggacgacagcaggggtcttgcgcttcctgggtacaagtacctcggacccttcaacggactcgacaaaggagagccggtcaacgaggcagacgccgcggccctcgagcacgacaaggcctacgaccggcagctcgacagcggagacaacccgtacctcaagtacaaccacgccgacgcggagtttcaggagcgccttaaagaagatacgtcttttgggggcaacctcgcaagagcagtattccaggcgaaaaagagggttcttgaacctctgggcctggttgaggagcctgttaagacggctccgggaaaaaagaggccggtagagcactctcctgcggagctagattcctcctccggaactggaaagtcgggccaacagcctgcaagaaagagattgaattttggtcagactggagacgcagactccgtacctgacccccagcctctcggacagccaccagcagccccctctggtctgggaactaatacgatggcttcaggcagtggcgcaccaatggcagacaataacgagggcgccgacggagtgggtaattcctcgggaaattggcattgcgattccacatggatgggcgacagagtcatcaccaccagcacccgcacctgggctctgcccacctacaacaaccatctgtacaagcaaatttccagccagtctggggccagcaacgacaaccactactttggctacagcaccccttgggggtattttgacttcaacagattccactgccacttctccccacgtgactggcaaagactcatcaacaacaattggggattccggcccaaaagactcaacttcaagctctttaacattcaagtcaaggaggtcacgcagaatgacggtacgacgacgattgccaataaccttaccagcacggttcaggtgtttactgactcggagtaccagctcccgtacgtcctcggctcggcgcatcaaggatgcctcccgccgttcccagcagacgtcttcatggtgccacagtatggatacctcaccctgaacaacgggagtcaggcggtaggacgctcttcattttactgcctggagtactttccttctcagatgctgcgtaccggaaacaactttaccttcagctacacctttgaggacgttccttttcacagcagctacgctcacagccagagtttggaccgtctcatgaatcctctcatcgaccagtacctgtattacttgagcagaacaaacactccaagcggaaccactacgcagtccgggcttcagttttctcaagccggagcgagtgacattcgggaccagtctaggaactggcttcctggaccctgttaccgccagcagcgagtatcaaagacagctgcggacaacaacaacagtgattactcgtggactggagctaccaagtatcacctcaatggaagagactctctggtgaatccgggcacagccatggccagccacaaggacgatgaagaaaagtattttcctcagagcggggttctcatcttcggaaaacaagactcgggaaaaactaatgtggacattgaaaaggtcatgattacagacgaagaggaaatcaggaccaccaatcccgtggctacggagcagtatggttctgtatctaccaatctccagagcggcaacacacaagcagctacctcagatgtcaacacacaaggcgttcttccaggcatggtctggcaggacagagacgtgtacctgcagggacccatctgggcaaagattccacacacggacggacattttcacccttctcctcttatgggagggtttggaccgaagcaccctcccccgcagattctcatcaagaataccccggtacctgcgaatccttctaccaccttcagcgcggcaaagtttgcttccttcatcacacagtactccacggggcaggtcagcgtggagatcgagtgggagctgcagaaagagaacagcaaacgctggaaccccgagatccagtatacctccaactacaacaagtctgttaatgtggactttactgtggacactaatggcgtgtattcagagcctcgccccattggcacaagatacctgactcgtaatctgtaa

SEQ ID NO: 3366 - DNA, 2208 bp, Artificial Sequence
  source: /note="Description of Artificial Sequence: Synthetic polynucleotide"
atggctgccgatggttatcttccagattggctcgaggacactctctctgaaggaataagacagtggtggaagctcaaacctggcccaccaccgccaaagcccgcagagcggcataaggacgacagcaggggtcttgtgcttcctgggtacaagtacctcggacccttcaacggactcgacaaaggagagccggtcaacgaggcagacgccgcggccctcgagcacgacaaggcctacgaccggcagctcgacagcggagacaacccgtacctcaagtacaaccacgccgacgcggagtttcaggagcgccttaaagaagatacgtcttttgggggcaacctcgcaagagcagtattccaggcgaaaaagagggttcttgaacctctgggcctggttgaggagcctgttaagacggctccgggaaaaaagaggccggtagagcactctcctgcggagccagattcctcctccggaactggaaagtcgggccaacagcctgcaagaaagagattgaattttggtcagactggagacgcagactccgtacctgacccccagcctctcggacagccaccagcagccccctctggtctgggaactaatacgatggcttcaggcagtggcgcaccaatggcagacaataacgagggcgccgacggagtgggtaattcctcgggaaattggcattgcgattccacatggatgggcgacagagtcatcaccaccagcacccgcacctgggctctgcccacctacaacaaccatctgtacaagcaaatttccagccagtctggagccagcaacgacaaccactactttggctacagcaccccttgggggtattttgacttcaacagattccactgccacttctccccacgtgactggcaaagactcatcaacaacaattggggattccggcccaaaagactcaacttcaagctctttaacattcaagtcaaggaggtcacgcagaatgacggtacgacgacggttgccaataaccttaccagcacggttcaggtgtttactgactcggagtaccagctcccgtacgtcctcggctcggcgcatcaaggatgcctcccgccgttcccagcagacgtcttcatggtgccacagtatggatacctcaccctgaacaacgggagtcaggcggtaggacgctcttcattttactgcctggagtacttcccttctcagatgctgcgtaccggaaacaactttaccttcagctacacctttgaggacgttccttttcacagcagctacgctcacagccagagtttggaccgtcttatgaatcctctcatcgaccagtacctgtattacttgagcagaacaaacactccaagcggaaccactacgcagtccaggcttcagttttctcaagccggagcgagtgacattcgggaccagtctaggaactggcttcctggaccctgttaccgccagcagcgagtatcaaagacagctgcggacaacaacaacagtgattactcgtggactggagctaccaagtatcacctcaatggaagagactctctggtgaatccgggcacagccatggccagccacaaggacgatgaagaaaagtattttcctcagagcggggttctcatcttcggaaaacaagactcgggaaaaactaatgtggacattgaaaaggtcatgattacagacgaagaggaaatcaggaccaccaatcccgtggctacggagcagtatggttctgtatctaccaatctccagagcggcaacacacaagcagctacctcagatgtcaacacacaaggcgttcttccaggcatggtccggcaggacagagacgtgtacctgcagggacccatctgggcaaagattccacacacggacggacattttcacccttctcctcttatgggaggatttggactgaagcaccctcccccgcagattctcatcaagaataccccggtacctgcgaatccttctaccaccttcagcgcggcaaagtttgcttccttcatcacacagtactccacggggcaggtcagcgtggagatcgagtgggagccgcagaaagagaacagcaaacgctggaaccccgagatccagtatacctccaactacaacaagtctgttaatgtggactttactgtggacactaatggcgtgtattcagagcctcgccccattggcacaagatacctgactcgtaatctgtaa

SEQ ID NO: 3367 - DNA, 2208 bp, Artificial Sequence
  source: /note="Description of Artificial Sequence: Synthetic polynucleotide"
atggctgccgatggttatcttccagattggctcgaggacactctctctgaaggaataagacagtggtggaagctcaaacctggcccaccaccgccaaagcccgcagagcggcataaggacgacagcaggggtcttgtgcttcctgggtacaagtacctcggacccttcaacggactcgacaaaggagagccggtcaacgaggcagacgccgcggccctcgagcacgacaaggcctacgaccggcagctcgacagcggagacaacccgtacctcaagtacaaccacgccgacgcggagtttcaggagcgccttaaagaagatacgtcttttgggggcaacctcgcaagagcagtattccaggcgaaaaagagggttcttgaacctctgggcctggttgaggagcctgttaagacggctccgggaaaaaagaggccggtagagcactctcctgcggagccagattcctcctccggaactggaaagtcgggccaacagcctgcaagaaagagattgaattttggtcagactggagacgcagactccgtacctgacccccagcctctcggacagccaccagcagccccctctggtctgggaactaatacgatggcttcaggcagtggcgcaccaatggcagacaataacgagggcgccgacggagtgggtaattcctcgggaaattggcattgcgattccacatggatgggcgacagagtcatcaccaccagcacccgcacctgggctctgcccacctacaacaaccatctgtacaagcaaatttccagccagtctggagccagcaacgacaaccactactttggctacagcaccccttgggggtattttgacttcaacagattccactgccacttctccccacgtgactggcaaagactcatcaacaacaattggggattccggcccaaaagactcaacttcaagctctttaacattcaagtcaaggaggtcacgcagaatgacggtacgacgacgattgccaataaccttaccagcacggttcaggtgtttactgactcggagtaccagctcccgtacgtcctcggctcggcgcatcaaggatgcctcccgccgttcccagcagacgtcttcatggtgccacagtatggatacctcaccctgaacaacgggagtcaggcggtaggacgctcttcattttactgcctggagtactttccttctcagatgctgcgtaccggaaacaactttaccttcagctacacctttgaggacgttccttttcacagcagctacgctcacagccagagtttggaccgtcttatgaatcctctcatcgaccagtacctgtattacttgagcagaacaaacactccaagcggaactactacgcagtccaggcttcagttttctcaagccggagcgagtgacattcgggaccagtctaggaactggcttcctggaccctgttaccgccagcagcgagtatcaaagacagctgcggacaacaacaacagtgattactcgtggactggagctaccaagtatcacctcaatggaagagactctctggtgaatccgggcacagccatggccagccacaaggacgatgaagaaaagtattttcctcagggcggggttctcatcttcggaaaacaagactcgggaaaaactaatgtggacattgaaaaggtcatgattacagacgaagaggaaatcaggaccaccaatcccgtggctacggagcagtatggttctgtatctaccaatctccagagcggcaacacacaagcagctacctcagatgtcaacacacaaggcgttcttccaggcatggtccggcaggacagagacgtgtacctgcagggacccatctgggcaaagattccacacacggacggacattttcacccttctcctcttatgggaggatttggactgaagcaccctcccccgcagattctcatcaagaataccccggtacctgcgaatccttctaccaccttcagcgcggcaaagtttgcttccttcatcacacagtactccacggggcaggtcagcgtggagatcgagtgggagccgcagaaagagaacagcaaacgctggaaccccgagatccagtatacctccaactacaacaagtctgttaatgtggactttactgtggacactaatggcgtgtattcagagcctcgccccattggcacaagatacctgactcgtaatctgtaa

SEQ ID NO: 3368 - DNA, 2208 bp, Artificial Sequence
  source: /note="Description of Artificial Sequence: Synthetic polynucleotide"
atggctgccgatggttatcttccagattggctcgaggacactctctctgaaggaataagacagtggtggaagctcaaacctggcccaccaccgccaaagcccgcagagcggcataaggacgacagcaggggtcttgcgcttcctgggtacaagtacctcggacccttcaacggactcgacaaaggagagccggtcaacgaggcagacgccgcggccctcgagcacgacaaggcctacgaccggcagctcgacagcggagacaacccgtacctcaagtacaaccacgccgacgcggagtttcaggagcgccttaaagaagatacgtcttttgggggcaacctcgcaagagcagtattccaggcgaaaaagagggttcttgaacctctgggcctggttgaggagcctgttaagacggctccgggaaaaaagaggccggtagagcactctcctgcggagctagattcctcctccggaactggaaagtcgggccaacagcctgcaagaaagagattgaattttggtcagactggagacgcagactccgtacctgacccccagcctctcggacagccaccagcagccccctctggtctgggaactaatacgatggcttcaggcagtggcgcaccaatggcagacaataacgagggcgccgacggagtgggtaattcctcgggaaattggcattgcgattccacatggatgggcgacagagtcatcaccaccagcacccgcacctgggctctgcccacctacaacaaccatctgtacaagcaaatttccagccagtctggggccagcaacgacaaccactactttggctacagcaccccttgggggtattttgacttcaacagattccactgccacttctccccacgtgactggcaaagactcatcaacaacaattggggattccggcccaaaagactcaacttcaagctctttaacattcaagtcaaggaggtcacgcagaatgacggtacgacgacgattgccaataaccttaccagcacggttcaggtgtttactgactcggagtaccagctcccgtacgtcctcggctcggcgcatcaaggatgcctcccgccgttcccagcagacgtcttcatggtgccacagtatggatacctcaccctgaacaacgggagtcaggcggtaggacgctcttcattttactgcctggagtactttccttctcagatgctgcgtaccggaaacaactttaccttcagctacacctttgaggacgttccttttcacagcagctacgctcacagccagagtttggaccgtctcatgaatcctctcatcgaccagtacctgtattacttgagcagaacaaacactccaagcggaaccactacgcagtccaggcttcagttttctcaagccggagcgagtgacattcgggaccagtctaggaactggcttcctggaccctgttaccgccagcagcgagtatcaaagacagctgcggacaacaacaacagtgattactcgtggactggagctaccaagtatcacctcaatggaagagactctctggtgaatccgggcacagccatggccggccacaaggacgatgaagaaaagtattttcctcagagcggggttctcatcttcggaaaacaagactcgggaaaaactaatgtggacattgaaaaggtcatgattacagacgaagaggaaatcaggaccaccaatcccgtggctacggagcagtatggttctgtatctaccaatctccagagcggcaacacacaagcagctacctcagatgtcaacacacaaggcgttcttccaggcatggtctggcaggacagagacgtgtacctgcagggacccatctgggcaaagattccacacacggacggacattttcacccttctcctcttatgggagggtttggaccgaagcaccctcccccgcagattctcatcaagaataccccggtacctgcgaatccttctaccaccttcagcgcggcaaagtttgcttccttcatcacacagtactccacggggcaggtcagcgtggagatcgagtgggagctgcagaaagagaacagcaaacgctggaaccccgagatccagtatacctccaactacaacaagtctgttaatgtggactttactgtggacactaatggcgtgtattcagagcctcgccccattggcacaagatacctgactcgtaatctgtaa

SEQ ID NO: 3369 - DNA, 2208 bp, Artificial Sequence
  source: /note="Description of Artificial Sequence: Synthetic polynucleotide"
atggctgccgatggttatcttccagattggctcgaggacactctctctgaaggaataagacagtggtggaagctcaaacctggcccaccaccgccaaagcccgcagagcggcataaggacgacagcaggggtcttgcgcttcctgggtacaagtacctcggacccttcaacggactcgacaaaggagagccggtcaacgaggcagacgccgcggccctcgagcacgacaaggcctacgaccggcagctcgacagcggagacaacccgtacctcaagtacaaccacgccgacgcggagtttcaggagcgccttaaagaagatacgtcttttgggggcaacctcgcaagagcagtattccaggcgaaaaagagggttcttgaacctctgggcctggttgaggagcctgttaagacggctccgggaaaaaagaggccggtagagcactctcctgcggagctagattcctcctccggaactggaaagtcgggccaacagcctgcaagaaagagattgaattttggtcagactggagacgcagactccgtacctgacccccagcctctcggacagccaccagcagccccctctggtctgggaactaatacgatggcttcaggcagtggcgcaccaatggcagacaataacgagggcgccgacggagtgggtaattcctcgggaaattggcattgcgattccacatggatgggcgacagagtcatcaccaccagcacccgcacctgggctctgcccacctacaacaaccatctgtacaagcaaatttccagccagtctggggccagcaacgacaaccactactttggctacagcaccccttgggggtattttgacttcaacagattccactgccacttctccccacgtgactggcaaagactcatcaacaacaattggggattccggcccaaaagactcaacttcaagctctttaacattcaagtcaaggaggtcacgcagaatgacggtacgacgacgattgccaataaccttaccagcacggttcaggtgtttactgactcggagtaccagctcccgtacgtcctcggctcggcgcatcaaggatgcctcccgccgttcccagcagacgtcttcatggtgccacagtatggatacctcaccctgaacaacgggagtcaggcggtaggacgctcttcattttactgcctggagtactttccttctcagatgctgcgtaccggaaacaactttaccttcagctacacctttgaggacgttccttttcacagcagctacgctcacagccagagtttggaccgtctcatgaatcctctcatcgaccagtacctgtattacttgagcagaacaaacactccaagcggaaccactacgcagtccaggcttcagttttctcaagccggagcgagtgacattcgggaccagtctaggaactggcttcctggaccctgttaccgccagcagcgagtatcaaagacagctgcggacaacaacaacagtgattactcgtggactggagctaccaagtatcacctcaatggaagagactctctggtgaatccgggcacagccatggccagccacaaggacgatgaagaaaagtattttcctcagagcggggttctcatcttcggaaaacaagactcgggaaaaactaatgtggacattgaaaaggtcatgattacagacgaagaggaaatcaggaccaccaatcccgtggctacggagcagtatggttctgtatctaccaatctccagagcggcaacacacaagcagctacctcagatgtcaacacacaaggcgttcttccaggcatggtctggcaggacagagacgtgtacctgcagggacccatctgggcaaagattccacacacggacggacattttcacccttctcctcttatgggaggatttggaccgaagcaccctcccccgcagattctcatcaagaataccccggtacctgcgaatccttctaccaccttcagcgcggcaaagtttgcttccttcatcacacagtactccacggggcaggtcagcgtggagatcgagtgggagctgcagaaagagaacagcaaacgctggaaccccgagatccagtatacctccaactacaacaagtctgttaatgtggactttactgtggacactaatggcgtgtattcagagcctcgccccattggcacaagatacctgactcgtaatctgtaa

SEQ ID NO: 3370 - DNA, 2208 bp, Artificial Sequence
  source: /note="Description of Artificial Sequence: Synthetic polynucleotide"
atggctgccgatggttatcttccagattggctcgaggacactctctctgaaggaataagacagtggtggaagctcaaacctggcccaccaccgccaaagcccgcagagcggcataaggacgacagcaggggtcttgtgcttcctgggtacaagtacctcggacccttcaacggactcgacaaaggagagccggtcaacgaggcagacgccgcggccctcgagcacgacaaggcctacgaccggcagctcgacagcggagacaacccgtacctcaagtacaaccacgccgacgcggagtttcaggagcgccttaaagaagatacgtcttttgggggcaacctcgcaagagcagtattccaggcgaaaaagagggttcttgaacctctgggcctggttgaggagcctgttaagacggctccgggaaaaaagaggccggtagagcactctcctgcggagccagattcctcctccggaactggaaagtcgggccaacagcctgcaagaaagagattgaattttggtcagactggagacgcagactccgtacctggcccccagcctctcggacagccaccagcagccccctctggtctgggaactaatacgatggcttcaggcagtggcgcaccaatggcagacaataacgagggcgccgacggagtgggtaattcctcgggaaattggcattgcgattccacatggatgggcgacagagtcatcaccaccagcacccgcacctgggctctgcccacctacaacaaccatctgtacaagcaaatttccagccagtctggagccagcaacgacaaccactactttggctacagcaccccttgggggtattttgacttcaacagattccactgccacttctccccacgtgactggcaaagactcatcaacaacaattggggattccggcccaaaagactcaacttcaagctctttaacattcaagtcaaggaggtcacgcagaatgacggtacgacgacggttgccaataaccttaccagcacggttcaggtgtttactgactcggagtaccagctcccgtacgtcctcggctcggcgcatcaaggatgcctcccgccgttcccagcagacgtcttcatggtgccacagtatggatacctcaccctgaacaacgggagtcaggcggtaggacgctcttcattttactgcctggagtactttccttctcagatgctgcgtaccggaaacaactttaccttcagctacacctttgaggacgttccttttcacagcagctacgctcacagccagagtttggaccgtcttatgaatcctctcatcgaccagtacctgtattacttgagcagaacaaacactccaagcggaaccactacgcagtccaggcttcagttttctcaagccggagcgagtgacattcgggaccagtctaggaactggcttcctggaccctgttaccgccagcagcgagtatcaaagacagctgcggacaacaacaacagtgattactcgtggactggagctaccaagtatcacctcaatggaagagactctctggtgaatccgggcacagccatggccagccacaaggacgatgaagaaaagtattttcctcagagcggggttctcatcttcggaaaacaagactcgggaaaaactaatgtggacattgaaaaggtcatgattacagacgaagaggaaatcaggaccaccaatcccgtggctacggagcagtatggttctgtatctaccaatctccagagcggcaacacacaagcagctacctcagatgtcaacacacaaggcgttcttccaggcatggtccggcaggacagagacgtgtacctgcagggacccatctgggcaaagattccacacacggacggacattttcacccttctcctcttatgggaggatttggactgaagcaccctcccccgcagattctcatcaagaataccccggtacctgcgaatccttctaccaccttcagcgcggcaaagtttgcttccttcatcacacagtactccacggggcaggtcagcgtggagatcgagtgggagccgcagaaagagaacagcaaacgctggaaccccgagatccagtatacctccaactacaacaagtctgttaatgtggactttactgtggacactaatggcgtgtattcagagcctcgccccattggcacaagatacctgactcgtaatctgtaa

SEQ ID NO: 3371 - DNA, 2208 bp, Artificial Sequence
  source: /note="Description of Artificial Sequence: Synthetic polynucleotide"
atggctgccgatggttatcttccagattggctcgaggacactctctctgaaggaataagacagtggtggaagctcaaacctggcccaccaccgccaaagcccgcagagcggcataaggacgacagcaggggtcttgtgcttcctgggtacaagtacctcggacccttcaacggactcgacaaaggagagccggtcaacgaggcagacgccgcggccctcgagcacgacaaggcctacgaccggcagctcgacagcggagacaacccgtacctcaagtacaaccacgccgacgcggagtttcaggagcgccttaaagaagatacgtcttttgggggcaacctcgcaagagcagtattccaggcgaaaaagagggttcttgaacctctgggcctggttgaggagcctgttaagacggctccgggaaaaaagaggccggtagagcactctcctgcggagccagattcctcctccggaactggaaagtcgggccaacagcctgcaagaaagagattgaattttggtcagactggagacgcagactccgtacctgacccccagcctctcggacagccaccagcagccccctctggtctgggaactaatacgatggcttcaggcagtggcgcaccaatggcagacaataacgagggcgccgacggagtgggtaattcctcgggaaattggcattgcgattccacatggatgggcgacagagtcatcaccaccagcacccgcacctgggctctgcccacctacaacaaccatctgtacaagcaaatttccagccagtctggagccagcaacgacaaccactactttggctacagcaccccttgggggtattttgacttcaacagattccactgccacttctccccacgtgactggcaaagactcatcaacaacaattggggattccggcccaaaagactcaacttcaagctctttaacattcaagtcaaggaggtcacgcagaatgacggtacgacgacgattgccaataaccttaccagcacggttcaggtgtttactgactcggagtaccagctcccgtacgtcctcggctcggcgcatcaaggatgcctcccgccgttcccagcagacgtcttcatggtgccacagtatggatacctcaccctgaacaacgggagtcaggcggtaggacgctcttcattttactgcctagagtactttccttctcagatgctgcgtaccggaaacaactttaccttcagctacacctttgaggacgctccttttcacagcagctacgctcacagccagagtttggaccgtcttatgaatcctctcatcgaccagtacctgtactacttgagcagaacaaacactccaagcggaaccactacgcagtccaggcttcagttttctcaagccggagcgagtgacattcgggaccagtctaggaactggcttcctggaccctgttaccgccagcagcgagtatcaaagacagctgcggacaacaacaacagtgattactcgtggactggagctaccaagtatcacctcaatggaagagactctctggtgaatccgggcacagccatggccagccacaaggacgatgaagaaaagtattttcctcagagcggggttctcatcttcggaaaacaagactcgggaaaaactaacgtggacattgaaaaggtcatgattacagacgaagaggaaatcaggaccaccaatcccgtggctacggagcagtatggttctgtatctaccaatctccagagcggcaacacacaagcagctacctcagatgtcaacacacaaggcgttcttccaggcatggtccggcaggacagagacgtgtacctgcagggacccatctgggcaaagattccacacacggacggacattttcacccttctcctcttatgggaggatttggactgaagcaccctcccccgcagattctcatcaagaataccccggtacctgcgaatccttctaccaccttcagcgcggcaaagtttgcttccttcatcacacagtactccacggggcaggtcagcgtggagatcgagtgggagccgcagaaagagaacagcaaacgctggaaccccgagatccagtatacctccaactacaacaagtctgttaatgtggactttactgtggacactaatggcgtgtattcagagcctcgccccattggcacaagatacctgactcgtaatctgtaa

SEQ ID NO: 3372 - DNA, 2208 bp, Artificial Sequence
  source: /note="Description of Artificial Sequence: Synthetic polynucleotide"
atggctgccgatggttatcttccagattggctcgaggacactctctctgaaggaataagacagtggtggaagctcaaacctggcccaccaccgccaaagcccgcagagcggcataaggacgacagcaggggtcttgtgcttcctgggtacaagtacctcggacccttcaacggactcgacaaaggagagccggtcaacgaggcagacgccgcggccctcgagcacgacaaggcctacgaccggcagctcgacagcggagacaacccgtacctcaagtacaaccacgccgacgcggagtttcaggagcgccttaaagaagatacgtcttttgggggcaacctcgcaagagcagtattccaggcgaaaaagagggttcttgaacctctgggcctggttgaggagcctgttaagacggctccgggaaaaaagaggccggtagagcactctcctgcggagccagattcctcctccggaactggaaagtcgggccaacagcctgcaagaaagagattgaattttggtcagactggagacgcagactccgtacctgacccccagcctctcggacagccaccagcagccccctctggtctgggaactaatacgatggcttcaggcagtggcgcaccaatggcagacaataacgagggcgccgacggagtgggtaattcctcgggaaattggcattgcgattccacatggatgggcgacagagtcatccccaccagcacccgcacctgggctctgcccacctacaacaaccatctgtacaagcaaatttccagccagtctggagccagcaacgacaaccactactttggctacagcaccccttgggggtattttgacttcaacagattccactgccacttctccccacgtgactggcaaagactcatcaacaacaattggggattccggcccaaaagactcaacttcaagctctttaacattcaagtcaaggaggtcacgcagaatgacggtacgacgacgattgccaataaccttaccagcacggttcaggtgtttactgactcggagtaccagctcccgtacgtcctcggctcggcgcatcaaggatgcctcccgccgttcccagcagacgtcttcatggtgccacagtatggatacctcaccctgaacaacgggagtcaggcggtaggacgctcttcattttactgcctggagtactttccttctcagatgctgcgtaccggaaacaactttaccttcagctacacctttgaggacgttccttttcacagcagctacgctcacagccagagtttggaccgtcttatgaatcctctcatcgaccagtacctgtattacttgagcagaacaaacactccaagcggaaccactacgcagtccaggcttcagttttctcaagccggagcgagtgacattcgggaccagtctaggaactggcttcctggaccctgttaccgccagcagcgagtatcaaagacagctgcggacaacaacaacagtgattactcgtggactggagctaccaagtatcacctcaatggaagagactctctggtgaatccgggcacagccatggccagccacaaggacgatgaagaaaagtattttcctcagagcggggttctcatcttcggaaaacaagactcgggaaaaactaatgtggacattgaaaaggtcatgattacagacgaagaggaaatcaggaccaccaatcccgtggctacggagcagtatggttctgtatctaccaatctccagagcggcaacacacaagcagctacctcagatgtcaacacacaaggcgttcttccaggcatggtccggcaggacagagacgtgtacctgcagggacccatctgggcaaagattccacacacggacggacattttcacccttctcctcttatgggaggatttggactgaagcaccctcccccgcagattctcatcaagaataccccggtacctgcgaatccttctaccaccttcagcgcggcaaagtttgcttccttcatcacacagtactccacggggcaggtcagcgtggagatcgagtgggagccgcagaaagagaacagcaaacgctggaaccccgagatccagtatacctccaactacaacaagtctgttaatgtggactttactgtggacactaatggcgtgtattcagagcctcgccccattggcacaagatacctgactcgtaatctgtaa

SEQ ID NO: 3373 - DNA, 2208 bp, Artificial Sequence
  source: /note="Description of Artificial Sequence: Synthetic polynucleotide"
atggctgccgatggttatcttccagattggctcgaggacactctctctgaaggaataagacagtggtggaagctcaaacctggcccaccaccgccaaagcccgcagagcggcataaggacgacagcaggggtcttgtgcttcctgggtacaagtacctcggacccttcaacggactcgacaaaggagagccggtcaacgaggcagacgccgcggccctcgagcacgacaaggcctacgaccggcagctcgacagcggagacaacccgtacctcaagtacaaccacgccgacgcggagtttcaggagcgccttaaagaagatacgtcttttgggggcaacctcgcaagagcagtattccaggcgaaaaagagggttcttgaacctctgggcctggttgaggagcctgttaagacggctccgggaaaaaagaggccggcagagcactctcctgcggagccagattcctcctccggaactggaaagtcgggccaacagcctgcaagaaagagattgaattttggtcagactggagacgcagactccgtacctgacccccagcctctcggacagccaccagcagccccctctggtctgggaactaatacgatggcttcaggcagtggcgcaccaatggcagacaataacgagggcgccgacggagtgggtaattcctcgggaaattggcattgcgattccacatggatgggcgacagagtcatcaccaccagcacccgcacctgggctctgcccacctacaacaaccatctgtacaagcaaatttccagccagtctggagccagcaacgacaaccactactttggctacagcaccccttgggggtattttgacttcaacagattccactgccacttctccccacgtgactggcaaagactcatcaacaacaattggggattccggcccaaaagactcaacttcaagctctttaacattcaagtcaaggaggtcacgcagaatgacggtacgacgacgattgccaataaccttaccagcacggttcaggtgtttactgactcggagtaccagctcccgtacgtcctcggctcggcgcatcaaggatgcctcccgccgttcccagcagacgtcttcatggtgccacagtatggatacctcaccctgaacaacgggagtcaggcggtaggacgctcttcattttactgcctagagtactttccttctcagatgctgcgtaccggaaacaactttaccttcagctacacctttgaggacgttccttttcacagcagctacgctcacagccagagtttggaccgtcttatgaatcctctcatcgaccagtacctgtattacttgagcagaacaaacactccaagcggaaccactacgcagtccaggcttcagttttctcaagccggagcgagtgacattcgggaccagtctaggaactggcttcctggaccctgttaccgccagcagcgagtatcaaagacagctgcggacaacaacaacagtgattactcgtggactggagctaccaagtatcacctcaatggaagagactctctggtgaatccgggcacagccatggccagccacaaggacgatgaagaaaagtattttcctcagagcggggttctcatcttcggaaaacaagactcgggaaaaactaatgtggacattgaaaaggtcatgattacagacgaagaggaaatcaggaccaccaatcccgtggctacggagcagtatggttctgtatctaccaatctccagagcggcaacacacaagcagctacctcagatgtcaacacacaaggcgttcttccaggcatggtccggcaggacagagacgtgtacctgcagggacccatctgggcaaagattccacacacggacggacattttcacccttctcctcttatgggaggatttggactgaagcaccctcccccgcagattctcatcaagaataccccggtacctgcgaatccttctaccaccttcagcgcggcaaagtttgcttccttcatcacacagtactccacggggcaggtcagcgtggagatcgagtgggagccgcagaaagagaacagcaaacgctggaaccccgagatccagtatacctccaactacaacaagtctgttaatgtggactttactgtggacactaatggcgtgtattcagagcctcgccccattggcacaagatacctgactcgtaatctgtaa

SEQ ID NO: 3374 - DNA, 2208 bp, Artificial Sequence
  source: /note="Description of Artificial Sequence: Synthetic polynucleotide"
atggctgccgatggttatcttccagattggctcgaggacactctctctgaaggaataagacagtggtggaagctcaaacctggcccaccaccgccaaagcccgcagagcggcataaggacgacagcaggggtcttgtgcttcctgggtacaagtacctcggacccttcaacggactcgacaaaggagagccggtcaacgaggcagacgccgcggccctcgagcacgacaaggcctacgaccggcagctcgacagcggagacaacccgtacctcaagtacaaccacgccgacgcggagtttcaggagcgccttaaagaagatacgtcttttgggggcaacctcgcaagagcagtattccaggcgaaaaagagggttcttgaacctctgggcctggttgaggagcctgttaagacggctccgggaaaaaagaggccggtagagcactctcctgcggagccagattcctcctccggaactggaaagtcgggccaacagcctgcaagaaagagattgaattttggtcagactggagacgcagactccgtacctgacccccagcctctcggacagccaccagcagccccctctggtctgggaactaatacgatggcttcaggcagtggcgcaccaatggcagacaataacgagggcgccgacggagtgggtaattcctcgggaaattggcattgcgattccacatggatgggcgacagagtcatcaccaccagcacccgcacctgggctctgcccacctacaacaaccatctgtacaagcaaatttccagccagtctggagccagcaacgacaaccactactttggctacagcaccccttgggggtattttgacttcaacagattccactgccacttctccccacgtgactggcaaagactcatcaacaacaattggggattccggcccaaaagactcaacttcaagctctttaacattcaagtcaaggaggtcacgcagaatgacggtacgacgacgattgccaataaccttaccagcacggttcaggtgtttactgactcggagtaccagctcccgtacgtcctcggctcggcgcatcaaggatgcctcccgccgttcccagcagacgtcttcatggtgccacagtatggatacctcaccctgaacaacgggagtcaggcggtaggacgctcttcattttactgcctggagtactttccttctcagatgctgcgtaccggaaacaactttaccttcagctacacctttgaggacgttccttttcacagcagctacgctcacagccagagtttggaccgtcttatgaatcctctcatcgaccagtacctgtattacttgagcagaacaaacactccaagcggaaccactacgcagtccaggcttcagttttctcaagccggagcgagtgacattcgggaccagtctaggaactggcttcctggaccctgttaccgccagcagcgagtatcaaggacagctgcggacaacaacaacagtgattactcgtggactggagctaccaagtatcacctcaatggaagagactctctggtgaatccgggcacagccatggccagccacaaggacgatgaagaaaagtattttcctcagagcggggttctcatcttcggaaaacaagactcgggaaaaactaatgtggacattgaaaaggtcatgattacagacgaagaggaaatcaggaccaccaatcccgtggctacggagcagtatggttctgtatctaccaatctccagagcggcaacacacaagcagctacctcagatgtcaacacacaaggcgttcttccaggcatggtccggcaggacagagacgtgtatctgcagggacccatctgggcaaagattccacacacggacggacattttcacccttctcctcttatgggaggatttggactgaagcaccctcccccgcagattctcatcaagaataccccggtacctgcgaatccttctaccaccttcagcgcggcaaagtttgcttccttcatcacacagtactccacggggcaggtcagcgtggagatcgagtgggagccgcagaaagagaacagcaaacgctggaaccccgagatccagtatacctccaactacaacaagtctgttaatgtggactttactgtggacactaatggcgtgtattcagagcctcgccccattggcacaagatacctgactcgtaatctgtaa

SEQ ID NO: 3375 - DNA, 2208 bp, Artificial Sequence
  source: /note="Description of Artificial Sequence: Synthetic polynucleotide"
atggctgccgatggttatcttccagattggctcgaggacactctctctgaaggaataagacagtggtggaagctcaaacctggcccaccaccgccaaagcccgcagagcggcataaggacgacagcaggggtcttgtgcttcctgggtacaagtacctcggacccttcaacggactcgacaaaggagagccggtcaacgaggcagacgccgcggccctcgagcacgacaaggcctacgaccggcagctcgacagcggagacaacccgtacctcaagtacaaccacgccgacgcggagtttcaggagcgccttaaagaagatacgtcttttgggggcaacctcgcaagagcagtattccaggcgaaaaagagggttcttgaacctctgggcctggttgaggagcctgttaagacggctccgggaaaaaagaggccggtagagcactctcctgcggggccagattcctcctccggaactggaaagtcgggccaacagcctgcaagaaagagattgaattttggtcagactggagacgcagactccgtacctgacccccagcctctcggacagccaccagcagccccctctggtctgggaactaatacgatggcttcaggcagtggcgcaccaatggcagacaataacgagggcgccgacggagtgggtaattcctcgggaaattggcattgcgattccacatggatgggcgacagagtcatcaccaccagcacccgcacctgggctctgcccacctacaacaaccatctgtacaagcaaatttccagccagtctggagccagcaacgacaaccactactttggctacagcaccccttgggggtattttgacttcaacagattccactgccacttctccccacgtgactggcaaagactcatcaacaacaattggggattccgggccaaaagactcaacttcgagctctttaacattcaagtcaaggaggtcacgcagaatgacggtacgacgacgattgccaataaccttaccagcacggttcaggtgtttactgactcggagtaccagctcccgtacgtcctcggctcggcgcatcaaggatgcctcccgccgttcccagcagacgtcttcatggtgccacagtatggatacctcaccctgaacaacgggagtcaggcggtaggacgctcttcattttactgcctggagtactttccttctcagatgctgcgtaccggaaacaactttaccttcagctacacctttgaggacgttccttttcacagcagctacgctcacagccagagtttggaccgtctcatgaatcctctcatcgaccagtacctgtattacttgagcagaacaaacactccaagcggaaccactacgcagtccaggcttcagttttctcaagccggagcgagtgacattcgggaccagtctaggaactggcttcctggaccctgttaccgccagcagcgagtatcaaagacagctgcggacaacaacaacagtgattactcgtggactggagctaccaagtatcacctcaatggaagagactctctggtgaatccgggcacagccatggccagccacaaggacgatgaagaaaagtattttcctcagagcggggttctcatcttcggaaaacaagactcgggaaaaactaatgtggacattgaaaaggtcatgattacagacgaagaggaaatcaggaccaccaatcccgtggctacggagcagtatggttctgtatctaccaatctccagagcggcaacacacaagcagctacctcagatgtcaacacacaaggcgttcttccaggcatggtctggcaggacagagacgtgtacctgcagggacccatctgggcaaagattccacacacggacggacactttcacccttctcctcttatgggaggatttggactgaagcaccctcccccgcagattctcatcaagagtaccccggtacctgcgaatccttctaccaccttcagcgcggcaaagtttgcttccttcatcacacagtactccacggggcaggtcagcgtggagatcgagtgggagctgcagaaagagaacagcaaacgctggaaccccgagatccagtatacctccaactacaacaagtctgttaatgtggactttactgtggacactaatggcgtgtattcagagcctcgccccattggcacaagatacctgactcgtaatctgtaa

SEQ ID NO: 3376 - DNA, 2208 bp, Artificial Sequence
  source: /note="Description of Artificial Sequence: Synthetic polynucleotide"
atggctgccgatggttatcttccagattggctcgaggacactctctctgaaggaataagacagtggtggaagctcaaacctggcccaccaccgccaaagcccgcagagcggcataaggacgacagcaggggtcttgtgcttcctgggtacaagtacctcggacccttcaacggactcgacaaaggagagccggtcaacgaggcagacgccgcggccctcgagcacgacaaggcctacgaccggcagctcgacagcggagacaacccgtacctcaagtacaaccacgccgacgcggagtttcaggagcgccttaaagaagatacgtcttttgggggcaacctcgcaagagcagtattccaggcgaaaaagagggttcttgaacctctgggcctggttgaggagcctgttaagacggctccgggaaaaaagaggccggtagagcactctcctgcggagccagattcctcctccggaactggaaagtcgggccaacagcctgcaagaaagagattgaattttggtcagactggagacgcagactccgtacctgacccccagcctctcggacagccaccagcagccccctctggtctgggaactaatacgatggcttcaggcagtggcgcaccaatggcagacaataacgagggcgccgacggagtgggtaattcctcgggaaattggcattgcgattccacatggatgggcgacagagtcatcaccaccagcacccgcacctgggctctgcccacctacaacaaccatctgtacaagcaaatttccagccagtctggagccagcaacgacaaccactactttggctacagcaccccttgggggtattttgacttcaacagattccactgccacttctccccacgtgactggcaaagactcatcaacaacaattggggattccggcccaaaagactcaacttcaagctctttaacattcaagtcaaggaggtcacgcagaatgacggtacgacgacgattgccaataaccttaccagcacggttcaggtgtttactgactcggagtaccagctcccgtacgtcctcggctcggcgcatcaaggatgcctcccgccgttcccagcagacgtcttcatggtgccacagtatggatacctcaccctgaacaacgggagtcaggcggtaggacgctcttcattttactgcctggagtactttccttctcagatgctgcgtaccggaaacaactttaccttcagctacacctttgaggacgttccttttcacagcagctacgctcacagccagagtttggaccgtctcatgaatcctctcatcgaccagtacctgtattacttgagcagaacaaacactccaagcggaaccactacgcagtccaggcttcggttttctcaagccggagcgagtgacattcgggaccagtctaggaactggcttcctggaccctgttaccgccagcagcgagtatcaaagacagctgcggacaacaacaacagtgattactcgtggactggagctaccaagtatcacctcaatggaagagactctctggtgaatccgggcacagccatggccagccacaaggacgatgaagaaaagtattttcctcagagcggggttctcatcttccggaaacaagactcgggaaaaactaatgtggacattgaaagggtcatgattacagacgaagaggaaatcaggaccaccaatcccgtggctacggagcagtatggttctgtatctaccaatctccagagcggcaacacacaagcagctacctcagatgtcaacacacaaggcgttcttccaggcatggtctggcaggacagagacgtgtacctgcagggacccatctgggcaaagattccacacacggacggacattttcacccttctcctcttatgggaggatttggactgaagcaccctcccccgcagattctcatcaagaataccccggtacctgcgaatccttctaccaccttcagcgcggcaaagtttgcttccttcatcacacagtactccacggggcaggtcagcgtggagatcgagtgggagctgcagaaagagaacagcaaacgctggaaccccgagatccagtatacctccaactacaacaagtctgttaatgtggactttactgtggacactaatggcgtgtattcagagcctcgccccattggcacaagatacctgactcgtaatctgtaa

SEQ ID NO: 3377 - DNA, 2208 bp, Artificial Sequence
  source: /note="Description of Artificial Sequence: Synthetic polynucleotide"
atggctgccgatggttatcttccagattggctcgaggacactctctctgaaggaataagacagtggtggaagctcaaacctggcccaccaccgccaaagcccgcagagcggcataaggacgacagcaggggtcttgtgcttcctgggtacaagtacctcggacccttcaacggactcgacaaaggagagccggtcaacgaggcagacgccgcggccctcgagcacgacaaggcctacgaccggcagctcgacagcggagacaacccgtacctcaagtacaaccacgccgacgcggagtttcaggagcgccttaaagaagatacgtcttttgggggcaacctcgcaagagcagtattccaggcgaaaaagagggttcttgaacctctgggcctggttgaggagcctgttaagacggctccgggaaaaaagaggccggtagagcactctcctgcggagccagattcctcctccggaactggaaagtcgggccaacagcctgcaagaaagagattgaattttggtcagactggagacgcagactccgtacctgacccccagcctctcggacagccaccagcagccccctctggtctgggaactaatacgatggcttcaggcagtggcgcaccaatggcagacaataacgagggcgccgacggagtgggtaattcctcgggaaattggcattgcgattccacatggatgggcgacagagtcatcaccaccagcacccgcacctgggctctgcccacctacaacaaccatctgtacaagcaaatttccagccagtctggagccagcaacgacaaccactactttggctacagcaccccttgggggtattttgacttcaacagattccactgccacttctccccacgtgactggcaaagactcatcaacaacaattggggattccgggccaaaagactcaacttcaagctctttaacattcaagtcaaggaggtcacgcagaatgacggtacgacgacgattgccaataaccttaccagcacggttcaggtgtttactgactcggagtaccagctcccgtacgtcctcggctcggcgcatcaaggatgcctcccgccgttcccagcagacgtcttcatggtgccacagtatggatacctcaccctgaacaacgggagtcaggcggtaggacgctcttcattttactgcctggagtactttccttctcagatgctgcgtaccggaaacaactttaccttcagctacacctttgaggacgttccttttcacagcagctacgctcacagccagagtttggaccgtctcatgaatcctctcatcgaccagtacctgtattacttgagcagaacaaacactccaagcggaaccactacgcagtccaggcttcggttttctcaagccggagcgagtgacattcgggaccagtctaggaactggcttcctggaccctgttaccgccagcagcgagtatcaaagacagctgcggacaacaacaacagtgattactcgtggactggagctaccaagtatcacctcaatggaagagactctctggtgaatccgggcacagccatggccagccacaaggacgatgaagaaaagtattttcctcagagcggggttctcatcttcggaaaacaagactcgggaaaaactaatgtggacattgaaagggtcatgattacagacgaagaggaaatcaggaccaccaatcccgtggctacggagcagtatggttctgtatctaccaatctccagagcggcaacacacaagcagctacctcagatgtcaacacacaaggcgttcttccaggcatggtctggcaggacagagacgtgtacctgcagggacccatctgggcaaagattccacacacggacggacattttcacccttctcctcttatgggaggatttggactgaagcaccctcccccgcagattctcatcaagaataccccggtacctgcgaatccttctaccaccttcagcgcggcaaagtttgcttccttcatcacacagtactccacggggcaggtcagcgtggagatcgagtgggagctgcagaaagagaacagcaaacgctggaaccccgagatccagtatacctccaactacaacaagtctgttaatgtggactttactgtggacactaatggcgtgtattcagagcctcgccccattggcacaagatacctgactcgtaatctgtaa

SEQ ID NO: 3378 - DNA, 2208 bp, Artificial Sequence
  source: /note="Description of Artificial Sequence: Synthetic polynucleotide"
atggctgccgatggttatcttccagattggctcgaggacactctctctgaaggaataagacagtggtggaagctcaaacctggcccaccaccaccaaggcccgcagagcggcatcaggacgacagcaggggtcttgtgcttcctgggtacaagtacctcggacccttcaacggactcgacaaaggagagccggtcaacgaggcagacgctgcggccctcgagcacgacaaggcctacgaccggcagctcgacagcggagacaacccgtacctcaagtacaaccacgccgacgcggagtttcaggagcgtcttaaagaagatacgtcttttgggggcaacctcggacgagcagtcttccaggcgaaaaagagggttcttgaacctctgggcctggttgaggaacctgttaagacggctccgggaaaaaagaggccggtagagcactctcctgcggagccagactcctcctcgggaaccggaaaagcgggccagcagcctgcaagaaagagattgaatttcggtcagactggagacgcagactccgtacctgacccccagcctctcggacagccaccagcagcccccacaagtttgggatctactacaatggctacaggcagtggcgcaccaatggcagacaataacgagggtgccgatggagtgggtaattcctcaggaaattggcattgcgattcccaatggctgggcgacagagtcatcaccaccagcacccgaacctgggccctgcccacctacaacaaccacctctacaagcaaatctccagccaatcaggagcatcgaacgacaaccactactttggctacagcaccccttgggggtattttgacttcaacagattccactgccacttctccccacgtgactggcaaagactcatcaacaacaattggggattccggcccaaaagactcaacttcgagctctttaacattcaagtcaaggaggtcacgcagaatgacggtacgacgacgattgccaataaccttaccagcacggttcaggtgtttactgactcggagtaccagctcccgtacgtcctcggctcggcgcatcaaggatgcctcccgccgttcccagcagacgtcttcatggtgccacagtatggatacctcaccctgaacaacgggagtcaggcggtaggacgctcttcattttactgcctggagtactttccttctcagatgctgcgtaccggaaacaactttaccttcagctacacctttgaggacgttccttttcacagcagctacgctcacagccagagtttggaccgtctcatgaatcctctcatcgaccagtacctgtattacttgagcagaacaaacactccaagcggaaccactacgcagtccaggcttcagttttctcaagccggagcgagtgacattcgggaccagtctaggaactggcttcctggaccctgttaccgccagcagcgagtatcaaagacagctgcggacaacaacaacagtgattactcgtggactggagctaccaagtatcacctcaatggaagagactctctggtgaatccgggcacagccatggccagccacaaggacgatgaagaaaagtattttcctcagagcggggttctcatcttcggaaaacaagactcgggaaaaactaatgtggacattgaaaaggtcatgattacagacgaagaggaaatcaggaccaccaatcccgtggctacggagcagtatggttctgtatctaccaatctccagagcggcaacacacaagcagctacctcagatgtcaacacacaaggcgttcttccaggcatggtctggcaggacagagacgtgtacctgcagggacccatctgggcaaagattccacacacggacggacactttcacccttctcctcttatgggaggatttggactgaagcaccctcccccgcagattctcatcaagagtaccccggtacctgcgaatccttctaccaccttcagcgcggcaaagtttgcttccttcatcacacagtactccacggggcaggtcagcgtggagatcgagtgggagctgcagaaagagaacagcaaacgctggaaccccgagatccagtatacctccaactacaacaagtctgttaatgtggactttactgtggacactaatggcgtgtattcagagcctcgccccattggcacaagatacctgactcgtaatctgtaa

SEQ ID NO: 3379 - DNA, 2208 bp, Artificial Sequence
  source: /note="Description of Artificial Sequence: Synthetic polynucleotide"
atggctgccgatggttatcttccagattggctcgaggacactctctctgaaggaataagacagtggtggaagctcaaacctggcccaccaccgccaaagcccgcagagcggcataaggacgacagcaggggtcttgtgcttcctgggtacaagtacctcggacccttcaacggactcgacaaaggagagccggtcaacgaggcagacgccgcggccctcgagcacgacaaggcctacgaccggcagctcgacagcggagacaacccgtacctcaagtacaaccacgccgacgcggagtttcaggagcgccttaaagaagatacgtcttttgggggcaacctcgcaagagcagtattccaggcgaaaaagagggttcttgaacctctgggcctggttgaggagcctgttaagacggctccgggaaaaaagaggccggtagagcactctcctgcggggccagattcctcctccggaactggaaagtcgggccaacagcctgcaagaaagagattgaattttggtcagactggagacgcagactccgtacctgacccccagcctctcggacagccaccagcagccccctctggtctgggaactaatacgatggcttcaggcagtggcgcaccaatggcagacaataacgagggcgccgacggagtgggtaattcctcgggaaattggcattgcgattccacatggatgggcgacagagtcatcaccaccagcacccgcacctgggctctgcccacctacaacaaccatctgtacaagcaaatttccagccagtctggagccagcaacgacaaccactactttggctacagcaccccttgggggtattttgacttcaacagattccactgccacttctccccacgtgactggcatagactcatcaacaacaattggggattccggcccaaaagactcaacttcgagctctttaacattcaagtcaaggaggtcacgcagaatgacggtacgacgacgattgccaataaccttaccagcacggttcaggtgtttactgactcggagtaccagctcccgtacgtcctcggctcggcgcatcaaggatgcctcccgccgttcccagcagacgtcttcatggtgccacagtatggatacctcaccctgaacaacgggagtcaggcggtaggacgctcttcattttactgcctggagtactttccttctcagatgctgcgtaccggaaacaactttaccttcagctacacctttgaggacgttccttttcacagcagctacgctcgcagccagagtttggaccgtctcatgaatcctctcatcgaccagtacctgtattacttgagcagaacaaacactccaagcggaaccactacgcagtccaggcttcagttttctcaagccggagcgagtgacattcgggaccagtctaggaactggcttcctggaccctgttaccgccagcagcgagtatcaaagacagctgcggacaacaacaacagtgattactcgtggactggagctaccaagtatcacctcaatggaagagactctctggtgaatccgggcacagccatggccagccacaaggacgatgaagaaaagtattttcctcagagcggggttctcatcttcggaaaacaagactcgggaaaaactaatgtggacattgaaaaggtcatgattacagacgaagaggaaatcaggaccaccaatcccgtggctacggagcagtatggttctgtatctaccaatctccagagcggcaacacacaagcagctacctcagatgtcaacacacaaggcgttcttccaggcatggtctggcaggacagagacgtgtacctgcagggacccatctgggcaaagattccacacacggacggacactttcacccttctcctcttatgggaggatttggactgaagcaccctcccccgcagattctcatcaagagtaccccggtacctgcgaatccttctaccaccttcagcgcggcaaagtttgcttccttcatcacacagtactccacggggcaggtcagcgtggagatcgagtgggagctgcagaaagagaacagcaaacgctggaaccccgagatccagtatacctccaactacaacaagtctgttaatgtggactttactgtggacactaatggcgtgtattcagagcctcgccccattggcacaagatacctgactcgtaatctgtaa

SEQ ID NO: 3380 - DNA, 2208 bp, Artificial Sequence
  source: /note="Description of Artificial Sequence: Synthetic polynucleotide"
atggctgccgatggttatcttccagattggctcgaggacactctctctgaaggaataagacagtggtggaagctcaaacctggcccaccaccgccaaagcccgcagagcggcataaggacgacagcaggggtcttgtgcttcctgggtacaagtacctcggacccttcaacggactcgacaaaggagagccggtcaacgaggcagacgccgcggccctcgagcacgacaaggcctacgaccggcagctcgacagcggagacaacccgtacctcaagtacaaccacgccgacgcggagtttcaggagcgccttaaagaagatacgtcttttgggggcaacctcgcaagagcagtattccaggcgaaaaagagggttcttgaacctctgggcctggttgaggagcctgttaagacggctccgggaaaaaagaggccggtagagcactctcctgcggggccagattcctcctccggaactggaaagtcgggccaacagcctgcaagaaagagattgaattttggtcagactggagacgcagactccgtacctgacccccagcctctcggacagccaccagcagccccctctggtctgggaactaatacgatggcttcaggcagtggcgcaccaatggcagacaataacgagggcgccgacggagtgggtaattcctcgggaaattggcattgcgattccacatggatgggcgacagagtcatcaccaccagcacccgcacctgggctctgcccacctacaacaaccatctgtacaagcaaatttccagccagtctggagccagcaacgacaaccactactttggctacagcaccccttgggggtattttgacttcaacagattccactgccacttctccccacgtgactggcaaagactcatcaacaacaattggggattccggcccaaaagactcaacttcgagctctttaacattcaagtcaaggaggtcacgcagaatgacggtacgacgacgattgccaataaccttaccagcacggttcaggtgtttactgactcggagtaccagctcccgtacgtcctcggctcggcgcatcaaggatgcctcccgccgttcccagcagacgtcttcatggtgccacagtatggatacctcaccctgaacaacgggagtcaggcggtaggacgctcttcattttactgcctggagtactttccttctcagatgctgcgtaccggaaacaactttaccttcagctacacctttgaggacgttccttttcacagcagctacgctcacagccagagtttggaccgtctcatgaatcctctcatcgaccagtacctgtattacttgagcagaacaaacactccaagcggaaccactacgcagtccaggcttcagttttctcaagccggagcgagtgacattcgggaccagtctaggaactggcttcctggaccctgttaccgccagcagcgagtatcaaagacagctgcggacaacaacaacagtgattactcgtggactggagctaccaagtatcacctcaatggaagagactctctggtgaatccgggcacagccatggccagccacaaggacgatgaagaaaagtattttcctcagagcggggttctcatcttcggaaaacaagactcgggaaaaactaatgtggacattgaaaaggtcatgattacagacgaagaggaaatcaggaccaccaatcccgtggctacggagcagtatggttctgtatctaccaatctccagagcggcaacacacaagcagctacctcagatgtcaacacacaaggcgttcttccaggcatggtctggcaggacagagacgtgtacctgcagggacccatctgggcaaagattccacacacggacggacactttcacccttctcctcttatgggaggatttggactgaagcaccctcccccgcagattctcatcaagagtaccccggtacctgcgaatccttctaccaccttcagcgcggcaaagtttgcttccttcatcacacagtactccacggggcaggtcagcgtggagatcgagtgggagctgcagaaggagaacagcaaacgctggaaccccgagatccagtacacttccaactacaacaaatctgttaatgtggactttactgtggacgctaatggtgtgtattcagagcctcgccccattggcaccagatacctgactcgtaatctgtaa

SEQ ID NO: 3381 - DNA, 2208 bp, Artificial Sequence
  source: /note="Description of Artificial Sequence: Synthetic polynucleotide"
atggctgccgatggttatcttccagattggctcgaggacactctctctgaaggaataagacagtggtggaagctcaaacctggcccaccaccgccaaagcccgcagagcggcataaggacgacagcaggggtcttgtgcttcctgggtacaagtacctcggacccttcaacggactcgacaaaggagagccggtcaacgaggcagacgccgcggccctcgagcacgacaaggcctacgaccggcagctcgacagcggagacaacccgtacctcaagtacaaccacgccgacgcggagtttcaggagcgccttaaagaagatacgtcttttgggggcaacctcgcaagagcagtattccaggcgaaaaagagggttcttgaacctctgggcctggttgaggagcctgttaagacggctccgggaaaaaagaggccggtagagcactctcctgcggggccagattcctcctccggaactggaaagtcgggccaacagcctgcaagaaagagattgaattttggtcagactggagacgcagactccgtacctgacccccagcctctcggacagccaccagcagccccctctggtctgggaactaatacgatggcttcaggcagtggcgcaccaatggcagacaataacgagggcgccgacggagtgggtaattcctcgggaaattggcattgcgattccacatggatgggcgacagagtcatcaccaccagcacccgcacctgggctctgcccacctacaacaaccatctgtacaagcaaatttccagccagtctggagccagcaacgacaaccactactttggctacagcaccccttgggggtattttgacttcaacagattccactgccacttctccccacgtgactggcaaagactcatcaacaacaatttgggattccgggccaaaagactcaacttcgagctctttaacattcaagtcaaggaggtcacgcagaatgacggtacgacgacgattgccaataaccttaccagcacggttcaggtgtttactgactcggagtaccagctcccgtacgtcctcggctcggcgcatcaaggatgcctcccgccgttcccagcagacgtcttcatggtgccacagtatggatacctcaccctgaacaacgggagtcaggcggtaggacgctcttcattttactgcctggagtactttccttctcagatgctgcgtaccggaaacaactttaccttcagctacacctttgaggacgttccttttcacagcagctacgctcacagccagagtttggaccgtctcatgaatcctctcatcgaccagtacctgtattacttgagcagaacaaacactccaagcggaaccactacgcagtccaggcttcagttttctcaagccggagcgagtgacattcgggaccagtctaggaactggcttcctggaccctgttaccgccagcagcgagtatcaaagacagctgcggacaacaacaacagtgattactcgtggactggagctaccaagtatcacctcaatggaagagactctctggtgaatccgggcacagccatggccagccacaaggacgatgaagaaaagtattttcctcagagcggggttctcatcttcggaaaacaagactcgggaaaaactaatgtggacattgaaaaggtcatgattacagacgaagaggaaatcaggaccaccaatcccgtggctacggagcagtatggttctgtatctaccaatctccagagcggcaacacacaagcagctacctcagatgtcaacacacaaggcgttcttccaggcatggtctggcaggacagagacgtgtacctgcagggacccatctgggcaaagattccacacacggacggacactttcacccttctcctcttatgggaggatttggactgaagcaccctcccccgcagattctcatcaagagtaccccggtacctgcgaatccttctaccaccttcagcgcggcaaagtttgcttccttcatcacacagtactccacggggcaggtcagcgtggagatcgagtgggagctgcagaaagagaacagcaaacgctggaaccccgagatccagtatacctccaactacaacaagtctgttaatgtggactttactgtggacactaatggcgtgtattcagagcctcgccccattggcacaagatacctgactcgtaatctgtaa

SEQ ID NO: 3382 - DNA, 2208 bp, Artificial Sequence
  source: /note="Description of Artificial Sequence: Synthetic polynucleotide"
atggctgccgatggttatcttccagattggctcgaggacactctctctgaaggaataagacagtggtggaagctcaaacctggcccaccaccgccaaagcccgcagagcggcataaggacgacagcaggggtcttgtgcttcctgggtacaagtacctcggacccttcaacggactcgacaaaggagagccggtcaacgaggcagacgccgcggccctcgagcacgacaaggcctacgaccggcagctcgacagcggagacaacccgtacctcaagtacaaccacgccgacgcggagtttcaggagcgccttaaagaagatacgtcttttgggggcaacctcgcaagagcagtattccaggcgaaaaagagggttcttgaacctctgggcctggttgaggagcctgttaagacggctccgggaaaaaagaggccggtagagcactctcctgcggagccagattcctcctccggaactggaaagtcgggccaacagcctgcaagaaagagattgaattttggtcagactggagacgcagactccgtacctgacccccagcctctcggacagccaccagcagccccctctggtctgggaactaatacgatggcttcaggcagtggcgcaccaatggcagacaataacgagggcgccgacggagtgggtaattcctcgggaaattggcattgcgattccacatggatgggcgacagagtcatcaccaccagcacccgcacctgggctctgcccacctacaacaaccatctgtacaagcaaatttccagccagtctggagccagcaacgacaaccactactttggctacagcaccccttgggggtattttgacttcaacagattccactgccacttctccccacgtgactggcaaagactcatcaacaacaattggggattccggcccaaaagactcaacttcgagctctttaacattcaagtcaaggaggtcacgcagaatgacggtacgacgacgattgccaataaccttaccagcacggttcaggtgtttactgactcggagtaccagctcccgtacgtcctcggctcggcgcatcaaggatgcctcccgccgttcccagcagacgtcttcatggtgccacagtatggatacctcaccctgaacaacgggagtcaggcggtaggacgctcttcattttactgcctggagtactttccttctcagatgctgcgtaccggaaacaactttaccttcagctacacctttgaggacgttccttttcacagcagctacgctcacagccagagtttggaccgtctcatgaatcctctcatcgaccagtacctgtattacttgagcagaacaaacactccaagcggaaccactacgcagtccaggcttcagttttctcaagccggagcgagtgacattcgggaccagtctaggaactggcttcctggaccctgttaccgccagcagcgagtatcaaagacagctgcggacaacaacaacagtgattactcgtggactggagctaccaagtatcacctcaatggaagagactctctggtgaatccgggcacagccatggccagccacaaggacgatgaagaaaagtattttcctcagagcggggttctcatcttccggaaacaagactcgggaaaaactaatgtggacattgaaaaggtcatgattacagacgaagaggaaatcaggaccaccaatcccgtggctacggagcagtatggttctgtatctaccaatctccagagcggcaacacacaagcagctacctcagatgtcaacacacaaggcgttcttccaggcatggtctggcaggacagagacgtgtacctgcagggacccatctgggcaaagattccacacacggacggacactttcacccttctcctcttatgggaggatttggactgaagcaccctcccccgcagattctcatcaagagtaccccggtacctgcgaatccttctaccaccttcagcgcggcaaagtttgcttccttcatcacacagtactccacggggcaggtcagcgtggagatcgagtgggagctgcagaaagagaacagcaaacgctggaaccccgagatccagtatacctccaactacaacaagtctgttaatgtggactttactgtggacactaatggcgtgtattcagagcctcgccccattggcacaagatacctgactcgtaatctgtaa

SEQ ID NO: 3383 - DNA, 2208 bp, Artificial Sequence
  source: /note="Description of Artificial Sequence: Synthetic polynucleotide"
atggctgccgatggttatcttccagattggctcgaggacactctctctgaaggaataagacagtggtggaagctcaaacctggcccaccaccaccaaagcccgcagagcggcatcaggacgacagcaggggtcttgtgcttcccgggcacaagtacctcggacccttcaacggactcgacaaaggagagccggtcaacgaggcagacgctgcggccctcgagcacgacaaggcctacgaccggcagctcgacagcggagacaacccgtacctcaagtacaaccacgccgacgcggagtttcaggagcgtcttaaagaagatacgtcttttgggggcaacctcggacgagcagtcttccaggcgaaaaagagggttcttgaacctctgggcctggttgaggagcctgttaagacggctccgggaaaaaagaggccggtagagcactctcctgcggggccagattcctcctccggaactggaaagtcgggccaacagcctgcaagaaagagattgaattttggtcagactggagacgcagactccgtacctgacccccagcctctcggacagccaccagcagccccctctggtctgggaactaatacgatggcttcaggcagtggcgcaccaatggcagacaataacgagggcgccgacggagtgggtaattcctcgggaaattggcattgcgattccacatggatgggcgacagagtcatcaccaccagcacccgcacctgggctctgcccacctacaacaaccatctgtacaagcaaatttccagccagtctggagccagcaacgacaaccactactttggctacagcaccccttgggggtattttgacttcaacagattccactgccacttctccccacgtgactggcaaagactcatcaacaacaattggggattccggcccaaaagactcaacttcgagctctttaacattcaagtcaaggaggtcacgcagaatgacggtacgacgacgattgccaataaccttaccagcacggttcaggtgtttactgactcggagtaccagctcccgtacgtcctcggctcggcgcatcaaggatgcctcccgccgttcccagcagacgtcttcatggtgccacagtatggatacctcaccctgaacaacgggagtcaggcggtaggacgctcttcattttactgcctggagtactttccttctcagatgctgcgtaccggaaacaactttaccttcagctacacctttgaggacgttccttttcacagcagctacgctcacagccagagtttggaccgtctcatgaatcctctcatcgaccagtacctgtattacttgagcagaacaaacactccaagcggaaccactacgcagtccaggcttcagttttctcaagccggagcgagtgacattcgggaccagtctaggaactggcttcctggaccctgttaccgccagcagcgagtatcaaagacagctgcggacaacaacaacagtgattactcgtggactggagctaccaagtatcacctcaatggaagagactctctggtgaatccgggcacagccatggccagccacaaggacgatgaagaaaagtattttcctcagagcggggttctcatcttcggaaaacaagactcgggaaaaactaatgtggacattgaaaaggtcatgattacagacgaagaggaaatcaggaccaccaatcccgtggctacggagcagtatggttctgtatctaccaatctccagagcggcaacacacaagcagctacctcagatgtcaacacacaaggcgttcttccaggcatggtctggcaggacagagacgtgtacctgcagggacccatctgggcaaagattccacacacggacggacactttcacccttctcctcttatgggaggatttggactgaagcaccctcccccgcagattctcatcaagagtaccccggtacctgcgaatccttctaccaccttcagcgcggcaaagtttgcttccttcatcacacagtactccacggggcaggtcagcgtggagatcgagtgggagctgcagaaagagaacagcaaacgctggaaccccgagatccagtatacctccaactacaacaagtctgttaatgtggactttactgtggacactaatggcgtgtattcagagcctcgccccattggcacaagatacctgactcgtaatctgtaa

SEQ ID NO: 3384 - DNA, 2208 bp, Artificial Sequence
  source: /note="Description of Artificial Sequence: Synthetic polynucleotide"
atggctgccgatggttatcttccagattggctcgaggacactctctctgaaggaataagacagtggtggaagctcaaacctggcccaccaccgccaaagcccgcagagcggcataaggacgacagcaggggtcttgtgcttcctgggtacaagtacctcggacccttcaacggactcgacaaaggagagccggtcaacgaggcagacgccgcggccctcgagcacgacaaggcctacgaccggcagctcgacagcggagacaacccgtacctcaagtacaaccacgccgacgcggagtttcaggagcgccttaaagaagatacgtcttttgggggcaacctcgcaagagcagtattccaggcgaaaaagagggttcttgaacctctgggcctggttgaggagcctgttaagacggctccgggaaaaaagaggccggtagagcactctcctgcggggccagattcctcctccggaactggaaagtcgggccaacagcctgcaagaaagagattgaattttggtcagactggagacgcagactccgtacctgacccccagcctctcggacagccaccagcagccccctctggtctgggaactaatacgatggcttcaggcagtggcgcaccaatggcagacaataacgagggcgccgacggagtgggtaattcctcgggaaattggcattgcgattccacatggatgggcgacagagtcatcaccaccagcacccgcacctgggctctgcccacctacaacaaccatctgtacaagcaaatttccagccagtctggagccagcaacgacaaccactactttggctacagcaccccttgggggtattttgacttcaacagattccactgccacttctccccacgtgactggcatagactcatcaacaacaattggggattccggcccaaaagactcaacttcgagctctttaacattcaagtcaaggaggtcacgcagaatgacggtacgacgacgattgccaataaccttaccagcacggttcaggtgtttactgactcggagtaccagctcccgtacgtcctcggctcggcgcatcaaggatgcctcccgccgttcccagcagacgtcttcatggtgccacagtatggatacctcaccctgaacaacgggagtcaggcggtaggacgctcttcattttactgcctggagtactttccttctcagatgctgcgtaccggaaacaactttaccttcagctacacctttgaggacgttccttttcacagcagctacgctcacagccagagtttggaccgtctcatgaatcctctcatcgaccagtacctgtattacttgagcagaacaaacactccaagcggaaccactacgcagtccaggcttcagttttctcaagccggagcgagtgacattcgggaccagtctaggaactggcttcctggaccctgttaccgccagcagcgagtatcaaagacagctgcggacaacaacaacagtgattactcgtggactggagctaccaagtatcacctcaatggaagagactctctggtgaatccgggcacagccatggccagccacaaggacgatgaagaaaagtattttcctcagagcggggttctcatcttcggaaaacaagactcgggaaaaactaatgtggacattgaaaaggtcatgattacagacgaagaggaaatcaggaccaccaatcccgtggctacggagcagtatggttctgtatctaccaatctccagagcggcaacacacaagcagctacctcagatgtcaacacacaaggcgttcttccaggcatggtctggcaggacagagacgtgtacctgcagggacccatctgggcaaagattccacacacggacggacactttcacccttctcctcttatgggaggatttggactgaagcaccctcccccgcagattctcatcaagagtaccccggtacctgcgaatccttctaccaccttcagcgcggcaaagtttgcttccttcatcacacagtactccacggggcaggtcagcgtggagatcgagtgggagctgcagaaagagaacagcaaacgctggaaccccgagatccagtatacctccaactacaacaagtctgttaatgtggactttactgtggacactaatggcgtgtattcagagcctcgccccattggcacaagatacctgactcgtaatctgtaa

SEQ ID NO: 3385 - DNA, 2208 bp, Artificial Sequence
  source: /note="Description of Artificial Sequence: Synthetic polynucleotide"
atggctgccgatggttatcttccagattggctcgaggacactctctctgaaggaataagacagtggtggaagctcaaacctggcccaccaccgccaaagcccgcagagcggcataaggacgacagcaggggtcttgtgcttcctgggtacaagtacctcggacccttcaacggactcgacaagggggagccggtcaacgaggcagacgccgcggccctcgagcacgacaaggcctacgaccggcagctcgacagcggagacaacccgtacctcaagtacaaccacgccgacgcggagtttcaggagcgtcttaaagaagatacgtcttttgggggcaacctcggacgagcagtcttccaggcgaaaaagagggttcttgaacctctgggcctggttgaggaacctgttaagacggctccgggaaaaaagaggccggtagagcactctcctgtggagccagactcctcctcgggaaccggaaaggcgggccagcagcctgcaagaaaaagattgaatttcggtcagactggagacgcagactccgtacctgacccccagcctctcggacagccaccagcagccccctctggtctgggaactaatacgatggctacaggcagtggcgcaccaatggcagacaataacgagggcgccgacggagtgggtaattcctcgggaaattggcattgcgattccacatggatgggcgacagagtcatcaccaccagcacccgcacctgggctctgcccacctacaacaaccatctgtacaagcaaatttccagccaatcaggagcatcgaacgacaaccactactttggctacagcaccccctgggggtattttgacttcaacagattccactgccacttttcgccacgtgactggcaaagactcatcaacaacaactggggattccggcccaagagactcagcttcaagctctttaacattcaagtcaaggaggtcacgcagaatgacggtacgacgacgattgccaataaccttaccagcacggttcaggtctttactgactcggagtaccagctcccgtacgtcctcggctcggcgcatcaaggatgcctcccgccgttcccagcagacgtcttcatggtgccacagtatggatacctcaccctgaacaacgggagtcaggcggtaggacgctcttcattttactgcctggagtacttcccttctcagatgcttcgcacgggaaacaactttaccttcagctacacctttgaggacgtgccttttcacagcggctacgctcacagccaaagtctggaccgtctcatgaatcctctcatcgaccaatacctgtattacttgagcaaaacaaacgctccaagcggaaccaccacgatgtccaggcttcagttttctcaggccggagcgagtgacattcgggaccagtctagaaactggcttcctggaccctgttaccgccagcagcgagtatcaaagacagctgcggacaacaacaacagtgattactcgtggactggagctaccaagtaccacctcaatggaagagactctctggtgaacccgggcccagctatggccagccacaaggatgatgaagaaaaatattttcctcagagcggggttctcatcttcgggaaacaaggctcaaataaaactaatgtggacattgaaaaggttatgattacagacgaagaggaaatcaggaccaccaatcccgtggctacggagcagtatggttctgtatctaccaaccttcaaagcggcaacacacaagcagctacctcagatgtcaacacacaaggcgttcttcctggcatggtctggcaggacagagatgtgtacctgcaggggcccatctgggcaaagattcctcacacggacggacactttcacccttctcccctcatgggcggatttggattgaagcaccctcccccacagattctcatcaagaataccccggtacctgcgaatccttcgaccaccttcagtgcggcaaagtttgcttccttcatcacacagtattccacgggacaggtcagcgtggagatagagtgggagctgcagaaggagaacagcaaacgctggaaccccgagatccagtatacttccaactacaacaaatctgttaatgtggactttactgtggacactaatggtgtgtattcagagcctcgccccattggcaccagatacctgactcgtaatctgtaa

SEQ ID NO: 3386 - DNA, 2208 bp, Artificial Sequence
  source: /note="Description of Artificial Sequence: Synthetic polynucleotide"
atggctgccgatggttatcttccagattggctcgaggacactctctctgaaggaataagacagtggtggaagctcaaacctggcccaccaccaccaaggcccgcagagcggcatcaggacgacagcaggggtcttgtgcttcctgggtacaagtacctcggacccttcaacggactcgacaaaggagagccggtcaacgaggcagacgctgcggccctcgagcacgacaaggcctacgaccggcagctcgacagcggagacaacccgtacctcaagtacaaccacgccgacgcggagtttcaggagcgtcttaaagaagatacgtcttttgggggcaacctcggacgagcagtcttccaggcgaaaaagagggttcttgaacctctgggcctggttgaggaacctgttaagacggctccgggaaaaaagaggccggtagagcactctcctgcggagccagactcctcctcgggaaccggaaaagcgggccagcagcctgcaagaaagagattgaatttcggtcagactggagacgcagactccgtacctgacccccagcctctcggacagccaccagcagcccccacaagtttgggatctactacaatggctacaggcagtggcgcaccaatggcagacaataacgagggcgccgacggagtgggtaattcctcgggaaattggcattgcgattccacatggatgggcgacagagtcatcaccaccagcacccgcacctgggctctgcccacctacaacaaccatctgtacaagcaaatttccagccagtctggagccagcaacgacaaccactactttggctacagcaccccttgggggtattttgacttcaacagattccactgccacttctccccacgtgactggcaaagactcatcaacaacaattggggattccggcccaaaagactcaacttcgagctctttaacattcaagtcaaggaggtcacgcagaatgacggtacgacgacgattgccaataaccttaccagcacggttcaggtgtttactgactcggagtaccagctcccgtacgtcctcggctcggcgcatcaaggatgcctcccgccgttcccagcagacgtcttcatggtgccacagtatggatacctcaccctgaacaacgggagtcaggcggtaggacgctcttcattttactgcctggagtactttccttctcagatgctgcgtaccggaaacaactttaccttcagctacacctttgaggacgttccttttcacagcagctacgctcacagccagagtttggaccgtctcatgaatcctctcatcgaccagtacctgtattacttgagcagaacaaacactccaagcggaaccactacgcagtccaggcttcagttttctcaagccggagcgagtgacattcgggaccagtctaggaactggcttcctggaccctgttaccgccagcagcgagtatcaaagacagctgcggacaacaacaacagtgattactcgtggactggagctaccaagtatcacctcaatggaagagactctctggtgaatccgggcacagccatggccagccacaaggacgatgaagaaaagtattttcctcagagcggggttctcatcttcggaaaacaagactcgggaaaaactaatgtggacattgaaaaggtcatgattacagacgaagaggaaatcaggaccaccaatcccgtggctacggagcagtatggttctgtatctaccaatctccagagcggcaacacacaagcagctacctcagatgtcaacacacaaggcgttcttccaggcatggtctggcaggacagagacgtgtacctgcagggacccatctgggcaaagattccacacacggacggacactttcacccttctcctcttatgggaggatttggactgaagcaccctcccccgcagattctcatcaagagtaccccggtacctgcgaatccttctaccaccttcagcgcggcaaagtttgcttccttcatcacacagtactccacggggcaggtcagcgtggagatcgagtgggagctgcagaaagagaacagcaaacgctggaaccccgagatccagtatacctccaactacaacaagtctgttaatgtggactttactgtggacactaatggcgtgtattcagagcctcgccccattggcacaagatacctgactcgtaatctgtaa

SEQ ID NO: 3387 - DNA, 2208 bp, Artificial Sequence
  source: /note="Description of Artificial Sequence: Synthetic polynucleotide"
atggctgccgatggttatcttccagattggctcgaggacactctctctgaaggaataagacagtggtggaagctcaaacctggcccaccaccaccaaagcccgcagagcggcatcaggacgacagcaggggtcttgtgcttcccgggcacaagtacctcggacccttcaacggactcgacaaaggagagccggtcaacgaggcagacgctgcggccctcgagcacgacaaggcctacgaccggcagctcgacagcggagacaacccgtacctcaagtacaaccacgccgacgcggagtttcaggagcgtcttaaagaagatacgtcttttgggggcaacctcggacgagcagtcttccaggcgaaaaagagggttcttgaacctctgggcctggttgaggaacctgttaagacggctccgggaaaaaagaggccggtagagcactctcctgcggagccagactcctcctcgggaaccggaaaagcgggccagcagcctgcaagaaagagattgaatttcggtcagactggagacgcagactccgtacctgacccccagcctctcggacagccaccagcagccccctctggtctgggaactaatacgatggcttcaggcagtggcgcaccaatggcagacaataacgagggcgccgacggagtgggtaattcctcgggaaattggcattgcgattccacatggatgggcgacagagtcatcaccaccagcacccgcacctgggctctgcccacctacaacaaccatctgtacaagcaaatttccagccagtctggagccagcaacgacaaccactactttggctacagcaccccttgggggtattttgacttcaacagattccactgccacttctccccacgtgactggcaaagactcatcaacaacaattggggattccggcccaaaagactcaacttcgagctctttaacattcaagtcaaggaggtcacgcagaatgacggtacgacgacgattgccaataaccttaccagcacggttcaggtgtttactgactcggagtaccagctcccgtacgtcctcggctcggcgcatcaaggatgcctcccgccgttcccagcagacgtcttcatggtgccacagtatggatacctcaccctgaacaacgggagtcaggcggtaggacgctcttcattttactgcctggagtactttccttctcagatgctgcgtaccggaaacaactttaccttcagctacacctttgaggacgttccttttcacagcagctacgctcacagccagagtttggaccgtctcatgaatcctctcatcgaccagtacctgtattacttgagcagaacaaacactccaagcggaaccactacgcagtccaggcttcagttttctcaagccggagcgagtgacattcgggaccagtctaggaactggcttcctggaccctgttaccgccagcagcgagtatcaaagacagctgcggacaacaacaacagtgattactcgtggactggagctaccaagtatcacctcaatggaagagactctctggtgaatccgggcacagccatggccagccacaaggacgatgaagaaaagtattttcctcagagcggggttctcatcttcggaaaacaagactcgggaaaaactaatgtggacattgaaaaggtcatgattacagacgaagaggaaatcaggaccaccaatcccgtggctacggagcagtatggttctgtatctaccaatctccagagcggcaacacacaagcagctacctcagatgtcaacacacaaggcgttcttccaggcatggtctggcaggacagagacgtgtacctgcagggacccatctgggcaaagattccacacacggacggacactttcacccttctcctcttatgggaggatttggactgaagcaccctcccccgcagattctcatcaagagtaccccggtacctgcgaatccttctaccaccttcagcgcggcaaagtttgcttccttcatcacacagtactccacggggcaggtcagcgtggagatcgagtgggagctgcagaaagagaacagcaaacgctggaaccccgagatccagtatacctccaactacaacaagtctgttaatgtggactttactgtggacactaatggcgtgtattcagagcctcgccccattggcacaagatacctgactcgtaatctgtaa

SEQ ID NO: 3388 - DNA, 2208 bp, Artificial Sequence
  source: /note="Description of Artificial Sequence: Synthetic polynucleotide"
atggctgccgatggttatcttccagattggctcgaggacactctctctgaaggaataagacagtggtggaagctcaaacctggcccaccaccgccaaagcccgcagagcggcataaggacgacagcaggggtcttgtgcttcctgggtacaagtacctcggacccttcaacggactcgacaaaggagagccggtcaacgaggcagacgccgcggccctcgagcacgacaaggcctacgaccggcagctcgacagcggagacaacccgtacctcaagtacaaccacgccgacgcggagtttcaggagcgccttaaagaagatacgtcttttgggggcaacctcgcaagagcagtattccaggcgaaaaagagggttcttgaacctctgggcctggttgaggagcctgttaagacggctccgggaaaaaagaggccggtagagcactctcctgcggagccagattcctcctccggaactggaaagtcgggccaacagcctgcaagaaagagattgaattttggtcagactggagacgcagactccgtacctgacccccagcctctcggacagccaccagcagccccctctggtctgggaactaatacgatggcttcaggcagtggcgcaccaatggcagacaataacgagggcgccgacggagtgggtaattcctcgggaaattggcattgcgattccacatggatgggcgacagagtcatcaccaccagcacccgcacctgggctctgcccacctacaacaaccatctgtacaagcaaatttccagccagtctggagccagcaacgacaaccactactttggctacagcaccccttgggggtattttgacttcaacagattccactgccacttctccccacgtgactggcaaagactcatcaacaacaattggggattccggcccaaaagactcaacttcaagctctttaacattcaagtcaaggaggtcacgcagaatgacggtacgacgacgattgccaataaccttaccagcacggttcaggtgtttactgactcggagtaccagctcccgtacgtcctcggctcggcgcatcaaggatgcctcccgccgttcccagcagacgtcttcatggtgccacagtatggatacctcaccctgaacaacgggagtcaggcggtaggacgctcttcattttactgcctggagtactttccttctcagatgctgcgtaccggaaacaactttaccttcagctacacctttgaggacgttccttttcacagcagctacgctcacagccagagtttggaccgtctcatgaatcctctcatcgaccagtacctgtattacttgagcagaacaaacactccaagcggaaccactacgcagtccaggcttcggttttctcaagccggagcgagtgacattcgggaccagtctaggaactggcttcctggaccctgttaccgccagcagcgagtatcaaagacagctgcggacaacaacaacagtgattactcgtggactggagctaccaagtatcacctcaatggaagagactctctggtgaatccgggcacagccatggccagccacaaggacgatgaagaaaagtattttcctcagagcggggttctcatcttcggaaaacaagactcggaaaaaactaatgtggacattgaaagggtcatgattacagacgaagaggaaatcaggaccaccaatcccgtggctacggagcagtatggttctgtatctaccaatctccagagcggcaacacacaagcagctacctcagatgtcaacacacaaggcgttcttccaggcatggtctggcaggacagagacgtgtacctgcagggacccatctgggcaaagattccacacacggacggacattttcacccttctcctcttatgggaggatttggactgaagcaccctcccccgcagattctcatcaagaataccccggtacctgcgaatccttctaccaccttcagcgcggcaaagtttgcttccttcatcacacagtactccacggggcaggtcagcgtggagatcgagtgggagctgcagaaagagaacagcaaacgctggaaccccgagatccagtatacctccaactacaacaagtctgttaatgtggactttactgtggacactaatggcgtgtattcagagcctcgccccattggcacaagatacctgactcgtaatctgtaa

SEQ ID NO: 3389 - DNA, 2208 bp, Artificial Sequence
  source: /note="Description of Artificial Sequence: Synthetic polynucleotide"
atggctgccgatggttatcttccagattggctcgaggacactctctctgaaggaataagacagtggtggaagctcaaacctggcccaccaccaccaaagcccgcagagcggcatcaggacgacagcaggggtcttgtgcttcctgggtacaagtacctcggacccttcaacggactcgacaaaggagagccggtcaacgaggcagacgccgcggccctcgagcacgacaaggcctacgaccggcagctcgacagcggagacaacccgtacctcaagtacaaccacgccgacgcggagtttcaggagcgtcttaaagaagatacgtcttttgggggcaacctcggacgagcagtcttccaggcgaaaaagagggttcttgaacctctgggcctggttgaggaacctgttaagacggctccgggaaaaaagaggccggtagagcactctcctgtggagccagactcctcctcgggaaccggaaaggcgggccagcagcctgcaagaaaaagattgaatttcggtcagactggagacgcagactccgtacctgacccccagcctctcggacagccaccagcagccccctctggtctgggaactaatacgatggctacaggcagtggcgcaccaatggcagacaataacgagggcgccgacggagtgggtaattcctcgggaaattggcattgcgattccacatggatgggcgacagagtcatcaccaccagcacccgcacctgggctctgcccacctacaacaaccatctgtacaagcaaatttccagccaatcaggagcatcgaacgacaaccactactttggctacagcaccccctgggggtattttgacttcaacagattccactgccacttttcgccacgtgactggcaaagactcatcaacaacaactggggattccggcccaagagactcagcttcaagctctttaacattcaagtcaaggaggtcacgcagaatgacggtacgacgacgattgccaataaccttaccagcacggttcaggtctttactgactcggagtaccagctcccgtacgtcctcggctcggcgcatcaaggatgcctcccgccgttcccagcagacgtcttcatggtgccacagtatggatacctcaccctgaacaacgggagtcaggcggtaggacgctcttcattttactgcctggagtacttcccttctcagatgcttcgcacgggaaacaactttaccttcagctacacctttgaggacgtgccttttcacagcagctacgctcacagccaaagtctggaccgtctcatgaatcctctcatcgaccaatacctgtattacttgagcaaaacaaacgctccaagcggaaccaccacgatgtccaggcttcagttttctcaggccggagcgagtgacattcgggaccagtctagaaactggcttcctggaccctgttaccgccagcagcgagtatcaaagacagctgcggacaacaacaacagtgattactcgtggactggagctaccaagtaccacctcaatggaagagactctctggtgaacccgggcccagctatggccagccacaaggatgatgaagaaaaatattttcctcagagcggggttctcatcttcgggaaacaaggctcaaataaaactaatgtggacattgaaaaggttatgattacagacgaagaggaaatcaggaccaccaatcccgtggctacggagcagtatggttctgtatctaccaaccttcaaagcggcaacacacaagcagctacctcagatgtcaacacacaaggcgttcttcctggcatggtctggcaggacagagatgtgtacctgcaggggcccatctgggcaaagattcctcacacggacggacactttcacccttctcccctcatgggcggatttggattgaagcaccctcccccacagattctcatcaagaataccccggtacctgcgaatccttcgaccaccttcagtgcggcaaagtttgcttccttcatcacacagtattccacgggacaggtcagcgtggagatagagtgggagctgcagaaggagaacagcaaacgctggaaccccgagatccagtatacttccaactacaacaaatctgttaatgtggactttactgtggacactaatggtgtgtattcagagcctcgccccattggcaccagatacctgactcgtaatctgtaa

SEQ ID NO: 3390 - DNA, 2208 bp, Artificial Sequence
  source: /note="Description of Artificial Sequence: Synthetic polynucleotide"
atggctgccgatggttatcttccagattggctcgaggacactctctctgaaggaataagacagtggtggaagctcaaacctggcccaccaccaccaaggcccgcagagcggcatcaggacgacagcaggggtcttgtgcttcctgggtacaagtacctcggacccttcaacggactcgacaaaggagagccggtcaacgaggcagacgctgcggccctcgagcacgacaaggcctacgaccggcagctcgacagcggagacaacccgtacctcaagtacaaccacgccgacgcggagtttcaggagcgtcttaaagaagatacgtcttttgggggcaacctcggacgagcagtcttccaggcgaaaaagagggttcttgaacctctgggcctggttgaggaacctgttaagacggctccgggaaaaaagaggccggtagagcactctcctgcggggccagattcctcctccggaactggaaagtcgggccaacagcctgcaagaaagagattgaattttggtcagactggagacgcagactccgtacctgacccccagcctctcggacagccaccagcagccccctctggtctgggaactaatacgatggcttcaggcagtggcgcaccaatggcagacaataacgagggcgccgacggagtgggtaattcctcgggaaattggcattgcgattccacatggatgggcgacagagtcatcaccaccagcacccgcacctgggctctgcccacctacaacaaccatctgtacaagcaaatttccagccagtctggagccagcaacgacaaccactactttggctacagcaccccttgggggtattttgacttcaacagattccactgccacttctccccacgtgactggcaaagactcatcaacaacaattggggattccgggccaaaagactcaacttcgagctctttaacattcaagtcaaggaggtcacgcagaatgacggtacgacgacgattgccaataaccttaccagcacggttcaggtgtttactgactcggagtaccagctcccgtacgtcctcggctcggcgcatcaaggatgcctcccgccgttcccagcagacgtcttcatggtgccacagtatggatacctcaccctgaacaacgggagtcaggcggtaggacgctcttcattttactgcctggagtactttccttctcagatgctgcgtaccggaaacaactttaccttcagctacacctttgaggacgttccttttcacagcagctacgctcacagccagagtttggaccgtctcatgaatcctctcatcgaccagtacctgtattacttgagcagaacaaacactccaagcggaaccactacgcagtccaggcttcagttttctcaagccggagcgagtgacattcgggaccagtctaggaactggcttcctggaccctgttaccgccagcagcgagtatcaaagacagctgcggacaacaacaacagtgattactcgtggactggagctaccaagtatcacctcaatggaagagactctctggtgaatccgggcacagccatggccagccacaaggacgatgaagaaaagtattttcctcagagcggggttctcatcttcggaaaacaagactcgggaaaaactaatgtggacattgaaaaggtcatgattacagacgaagaggaaatcaggaccaccaatcccgtggctacggagcagtatggttctgtatctaccaatctccagagcggcaacacacaagcagctacctcagatgtcaacacacaaggcgttcttccaggcatggtctggcaggacagagacgtgtacctgcagggacccatctgggcaaagattccacacacggacggacactttcacccttctcctcttatgggaggatttggactgaagcaccctcccccgcagattctcatcaagagtaccccggtacctgcgaatccttctaccaccttcagcgcggcaaagtttgcttccttcatcacacagtactccacggggcaggtcagcgtggagatcgagtgggagctgcagaaagagaacagcaaacgctggaaccccgagatccagtatacctccaactacaacaagtctgttaatgtggactttactgtggacactaatggcgtgtattcagagcctcgccccattggcacaagatacctgactcgtaatctgtaa

SEQ ID NO: 3391 - DNA, 2208 bp, Artificial Sequence
  source: /note="Description of Artificial Sequence: Synthetic polynucleotide"
atggctgccgatggttatcttccagattggctcgaggacactctctctgaaggaataagacagtggtggaagctcaaacctggcccaccaccgccaaagcccgcagagcggcataaggacgacagcaggggtcttgtgcttcctgggtacaagtacctcggacccttcaacggactcgacaaaggagagccggtcaacgaggcagacgccgcggccctcgagcacgacaaggcctacgaccggcagctcgacagcggagacaacccgtacctcaagtacaaccacgccgacgcggagtttcaggagcgccttaaagaagatacgtcttttgggggcaacctcgcaagagcagtattccaggcgaaaaagagggttcttgaacctctgggcctggttgaggagcctgttaagacggctccgggaaaaaagaggccggtagagcactctcctgcggggccagattcctcctccggaactggaaagtcgggccaacagcctgcaagaaagagattgaattttggtcagactggagacgcagactccgtacctgacccccagcctctcggacagccaccagcagccccctctggtctgggaactaatacgatggcttcaggcagtggcgcaccaacggcagacaataacgagggcgccgacggagtgggtaattcctcgggaaattggcattgcgattccacatggatgggcgacagagtcatcaccaccagcacccgcacctgggctctgcccacctacaacaaccatctgtacaagcaaatttccagccagtctggagccagcaacgacaaccactactttggctacagcaccccttgggggtattttgacttcaacagattccactgccacttctccccacgtgactggcaaagactcatcaacaacaattggggattccggcccaaaagactcaacttcgagctctttaacattcaagtcaaggaggtcacgcagaatgacggtacgacgacgattgccaataaccttaccagcacggttcaggtgtttaccgactcggagtaccagctcccgtacgtcctcggctcggcgcatcaaggatgcctcccgccgttcccagcagacgtcttcatggtgccacagtatggatacctcaccctgaacaacgggagtcaggcggtaggacgctcttcattttactgcctggagtactttccttctcagatgctgcgtaccggaaacaactttaccttcagctacacctttgaggacgttccttttcacagcagctacgctcacagccagagtttggaccgtctcatgaatcctctcatcgaccagtacctgtattacttgagcagaacaaacactccaagcggaaccactacgcagtccaggcttcagttttctcaagccggagcgagtgacattcgggaccagtctaggaactggcttcctggaccctgttaccgccagcagcgagtatcaaagacagctgcggacaacaacaacagtgattactcgtggactggagctaccaagtatcacctcaatggaagagactctctggtgaatccgggcacagccatggccagccacaaggacgatgaagaaaagtattttcctcagagcggggttctcatcttcggaaaacaagactcgggaaaaactaatgtggacattgaaaaggtcatgattacagacgaagaggaaatcaggaccaccaatcccgtggctacggagcagtatggttctgtatctaccaatctccagagcggcaacacacaagcagctacctcagatgtcaacacacaaggcgttcttccaggcatggtctggcaggacagagacgtgtacctgcagggacccatctgggcaaagattccacacacggacggacactttcacccttctcctcttatgggaggatttggactgaagcaccctcccccgcagattctcatcaagagtaccccggtacctgcgaatccttctaccaccttcagcgcggcaaagtttgcttccttcatcacacagtactccacggggcaggtcagcgtggagatcgagtgggagctgcagaaagagaacagcaaacgctggaaccccgagatccagtatacctccaactacaacaagtctgttaatgtggactttactgtggacactaatggcgtgtattcagagcctcgccccattggcacaagatacctgactcgtaatctgtaa

SEQ ID NO: 3392 - DNA, 2208 bp, Artificial Sequence
  source: /note="Description of Artificial Sequence: Synthetic polynucleotide"
atggctgccgatggttatcttccagattggctcgaggacactctctctgaaggaataagacagtggtggaagctcaaacctggcccaccaccgccaaagcccgcagagcggcataaggacgacagcaggggtcttgtgcttcctgggtacaagtacctcggacccttcaacggactcgacaaaggagagccggtcaacgaggcagacgccgcggccctcgagcacgacaaggcctacgaccggcagctcgacagcggagacaacccgtacctcaagtacaaccacgccgacgcggagtttcaggagcgccttaaagaagatacgtcttttgggggcaacctcgcaagagcagtattccaggcgaaaaagagggttcttgaacctctgggcctggttgaggagcctgttaagacggctccgggaaaaaagaggccggtagagcactctcctgcggggccagattcctcctccggaactggaaagtcgggccaacagcctgcaagaaagagattgaattttggtcagactggagacgcagactccgtacctgacccccagcctctcggacagccaccagcagccccctctggtctgggaactaatacgatggcttcaggcagtggcgcaccaatggcagacaataacgagggcgccgacggagtgggtaattcctcgggaaattggcattgcgattccacatggatgggcgacagagtcatcaccaccagcacccgcacctgggctctgcccacctacaacaaccatctgtacaagcaaatttccagccagtctggagccagcaacgacaaccactactttggctacagcaccccttgggggtattttgacttcaacagattccactgccacttctccccacgtgactggcaaagactcatcaacaacaattggggattccggcccaaaagactcaacttcgagctctttaacattcaagtcaaggaggtcacgcagaatgacggtacgacgacgattgccaataaccttaccagcacggttcaggtgtttactgactcggagtaccagctcccgtacgtcctcggctcggcgcatcaaggatgcctcccgccgttcccagcagacgtcttcatggtgccacagtatggatacctcaccctgaacaacgggagtcaggcggtaggacgctcttcattttactgcctggagtactttccttctcagatgctgcgtaccggaaacaactttaccttcagctacacctttgaggacgttccttttcacagcagctacgctcacagccagagtttggaccgtctcatgaatcctctcatcgaccagtacctgtattacttgagcagaacaaacactccaagcggaaccactacgcagtccaggcttcagttttctcaagccggagcgagtgacattcgggaccagtctaggaactggcttcctggaccctgttaccgccagcagcgagtatcaaagacagctgcggacaacaacaacagtgattactcgtggactggagctaccaagtatcacctcaatggaagagactctctggtgaatccgggcacagccatggccagccacaaggacgatgaagaaaagtattttcctcagagcggggttctcatcttccggaaacaagactcgggaaaaactaatgtggacattgaaaaggtcatgattacagacgaagaggaaatcaggaccaccaatcccgtggctacggagcagtatggttctgtatctaccaatctccagagcggcaacacacaagcagctacctcagatgtcaacacacaaggcgttcttccaggcatggtctggcaggacagagacgtgtacctgcagggacccatctgggcaaagattccacacacggacggacactttcacccttctcctcttatgggaggatttggactgaagcaccctcccccgcagattctcatcaagagtaccccggtacctgcgaatccttctaccaccttcagcgcggcaaagtttgcttccttcatcacacagtactccacggggcaggtcagcgtggagatcgagtgggagctgcagaaagagaacagcaaacgctggaaccccgagatccagtatacctccaactacaacaagtctgttaatgtggactttactgtggacactaatggcgtgtattcagagcctcgccccattggcacaagatacctgactcgtaatctgtaa

SEQ ID NO: 3393 - DNA, 2208 bp, Artificial Sequence
  source: /note="Description of Artificial Sequence: Synthetic polynucleotide"
atggctgccgatggttatcttccagattggctcgaggacactctctctgaaggaataagacagtggtggaagctcaaacctggcccaccaccgccaaagcccgcagagcggcataaggacgacagcaggggtcttgtgcttcctgggtacaagtacctcggacccttcaacggactcgacaaaggagagccggtcaacgaggcagacgccgcggccctcgagcacgacaaggcctacgaccggcagctcgacagcggagacaacccgtacctcaagtacaaccacgccgacgcggagtttcaggagcgccttaaagaagatacgtcttttgggggcaacctcgcaagagcagtattccaggcgaaaaagagggttcttgaacctctgggcctggttgaggagcctgttaagacggctccgggaaaaaagaggccggtagagcactctcctgcggagccagattcctcctccggaactggaaagtcgggccaacagcctgcaagaaagagattgaattttggtcagactggagacgcagactccgtacctgaccctcagcctctcggacagccaccagcagccccctctggtctgggaactaatacgatggcttcaggcagtggcgcaccaatggcagacaataacgagggcgccgacggagtgggtaattcctcgggaaattggcattgcgattccacatggatgggcgacagagtcatcaccaccagcacccgcacctgggctctgcccacctacaacaaccatctgtacaagcaaatttccagccagtctggagccagcaacgacaaccactactttggctacagcaccccttgggggtattttgacttcaacagattccactgccacttctccccacgtgactggcaaagactcatcaacaacaattggggattccggcccaaaagactcaacttcaagctctttaacattcaagtcaaggaggtcacgcagaatgacggtacgacgacgattgccaataaccttaccagcacggttcaggtgtttactgactcggagtaccagctcccgtacgtcctcggctcggcgcatcaaggatgcctcccgccgttcccagcagacgtcttcatggtgccacagtatggatacctcaccctgaacaacgggagtcaggcggtaggacgctcttcattttactgcctggagtactttccttctcagatgctgcgtaccggaaacaactttaccttcagctacacctttgaggacgttccttttcacagcagctacgctcacagccagagtttggaccgtctcatgaatcctctcatcgaccagtacctgtattacttgagcagaacaaacactccaagcggaaccactacgcagtccaggcttcagttttctcaagccggagcgagtgacattcgggaccagtctaggaactggcttcctggaccctgttaccgccagcagcgagtatcaaagacagctgcggacaacaacaacagtgattactcgtggactggagctaccaagtatcacctcaatggaagagactctctggtgaatccgggcacagccatggccagccacaaggacgatgaagaaaagtattttcctcagagcggggctctcatcttcggaaaacaagactcgggaaaaactaatgtggacattgaaaaggtcatgattacagacgaagaggaaatcaggaccaccaatcccgtggctacggagcagtatggttctgtatctaccaatctccagagcggcaacacacaagcagctacctcagatgtcaacacacaaggcgttcttccaggcatggtctggcaggacagagacgtgtacctgcagggacccatctgggcaaagattccacacacggacggacattttcacccttctcctcttatgggaggatttggactgaagcaccctcccccgcagattctcatcaagaataccccggtacctgcgaatccttctaccaccttcagcgcggcaaagtttgcttccttcatcacacagtactccacggggcaggtcagcgtggagatcgagtgggagctgcagaaagagaacagcaaacgctggaaccccgagatccagtatacctccaactacaacaagtctgttaatgtggactttactgtggacactaatggcgtgtattcagagcctcgccccattggcacaagatacctgactcgtaatctgtaa

SEQ ID NO: 3394 - DNA, 2208 bp, Artificial Sequence
  source: /note="Description of Artificial Sequence: Synthetic polynucleotide"
atggctgccgatggttatcttccagattggctcgaggacactctctctgaaggaataagacagtggtggaagctcaaacctggcccaccaccgccaaagcccgcagagcggcataaggacgacagcaggggtcttgtgcttcctgggtacaagtacctcggacccttcaacggactcgacaaaggagagccggtcaacgaggcagacgccgcggccctcgagcacgacaaggcctacgaccggcagctcgacagcggagacaacccgtacctcaagtacaaccacgccgacgcggagtttcaggagcgccttaaagaagatacgtcttttgggggcaacctcgcaagagcagtattccaggcgaaaaagagggttcttgaacctctgggcctggttgaggagcctgttaagacggctccgggaaaaaagaggccggtagagcactctcctgcggagccaggttcctcctccggaactggaaagtcgggccaacagcctgcaagaaagagattgaattttggtcagactggagacgcagactccgtacctgacccccagcctctcggacagccaccagcagccccctctggtctgggaactaatacgatggcttcaggcagtggcgcaccaatggcagacaataacgagggcgccgacggagtgggtaattcctcgggaaattggcattgcgattccacatggatgggcgacagagtcatcaccaccagcacccgcacctgggctctgcccacctacaacaaccatctgtacaagcaaatttccagccagtctggagccagcaacgacaaccactactttggctacagcaccccttgggggtattttgacttcaacagattccactgccacttctccccacgtgactggcaaagactcatcaacaacaattggggattccggcccaaaagactcaacttcaagctctttaacattcaagtcaaggaggtcacgcagaatgacggtacgacgacgattgccaataaccttaccagcacggttcaggtgtttactgactcggagtaccagctcccgtacgtcctcggctcggcgcatcaaggatgcctcccgccgttcccagcagacgtcttcatggtgccacagtatggatacctcaccctgaacaacgggagtcaggcggtaggacgctcttcattttactgcctggagtactttccttctcagatgctgcgtaccggaaacaactttaccttcagctacacctttgaggacgttccttttcacagcagctacgctcgcagccagagtttggaccgtctcatgaatcctctcatcgaccagtacctgtattacttgagcagaacaaacactccaagcggaaccactacgcagtccaggcttcggttttctcaagccggagcgagtgacattcgggaccagtctaggaactggcttcctggaccctgttaccgccagcagcgagtatcaaagacagctgcggacaacaacaacagtgattactcgtggactggagctaccaagtatcacctcaatggaagagactctctggtgaatccgggcacagccatggccagccacaaggacgatgaagaaaagtattttcctcagagcggggttctcatcttcggaaaacaagactcgggaaaaactaatgtggacattgaaagggtcatgattacagacgaagaggaaatcaggaccaccaatcccgtggctacggagcagtatggttctgtatctaccaatctccagagcggcaacacacaagcagctacctcagatgtcaacacacaaggcgttcttccaggcatggtctggcaggacagagacgtgtacctgcagggacccatctgggcaaagattccacacacggacggacattttcacccttctcctcttatgggaggatttggactgaagcaccctcccccgcagattctcatcaagaataccccggtacctgcgaatccttctaccaccttcagcgcggcaaagtttgcttccttcatcacacagtactccacggggcaggtcagcgtggagatcgagtgggagctgcagaaagagaacagcaaacgctggaaccccgagatccagtatacctccaactacaacaagtctgttaatgtggactttactgtggacactaagggcgtgtattcagagcctcgccccattggcacaagatacctgactcgtaatctgtaa

SEQ ID NO: 3395 - DNA, 2208 bp, Artificial Sequence
  source: /note="Description of Artificial Sequence: Synthetic polynucleotide"
atggctgccgatggttatcttccagattggctcgaggacactctctctgaaggaataagacagtggtggaagctcaaacctggcccaccaccgccaaagcccgcagagcggcataaggacgacagcaggggtcttgtgcttcctgggtacaagtacctcggacccttcaacggactcgacaaaggagagccggtcaacgaggcagacgccgcggccctcgagcacgacaaggcctacgaccggcagctcgacagcggagacaacccgtacctcaagtacaaccacgccgacgcggagtttcaggagcgccttaaagaagatacgtcttttgggggcaacctcgcaagagcagtattccaggcgaaaaagagggttcttgaacctctgggcctggttgaggagcctgttaagacggctccgggaaaaaagaggccggtagagcactctcctgcggagccagattcctcctccggaactggaaagtcgggccaacagcctgcaagaaagagattgaattttggtcagactggagacgcagactccgtacctgacccccagcctctcggacagccaccagcagccccctctggtctgggaactaatacgatggcttcaggcagtggcgcaccaatggcagacaataacgagggcgccgacggagtgggtaattcctcgggaaattggcattgcgattccacatggatgggcgacagagtcatcaccaccagcacccgcacctgggctctgcccacctacaacaaccatctgtacaagcaaatttccagccagtctggagccagcaacgacaaccactactttggctacagcaccccttgggggtattttgacttcaacagattccactgccacttctccccacgtgactggcaaagactcatcaacaacaattggggattccggcccaaaagactcaacttcaagctctttaacattcaagtcaaggaggtcacgcagaatgacggtacgacgacgattgccaataaccttaccagcacggttcaggtgtttactgactcggagtaccagctcccgtacgtcctcggctcggcgcatcaaggatgcctcccgccgttcccagcagacgtcttcatggtgccacagtatggatacctcaccctgaacaacgggagtcaggcggtaggacgctcttcattttactgcctggagtactttccttctcagatgctgcgtaccggaaacaactttaccttcagctacacctttgaggacgttccttttcacagcagctacgctcacagccagagtttggaccgtctcatgaatcctctcatcgaccagtacctgtattacttgagcagaacaaacactccaagcggaaccactacgcagtccaggcttcagttttctcaagccggagcgagtgacattcgggaccagtctaggaactggcttcctggaccctgttaccgccagcagcgagtatcaaagacagctgcggacaacaacaacagtgattactcgtggactggagctaccaagtatcacctcaatggaagagactctctggtgaatccgggcacagccatggccagccacaaggacgatgaagaaaagtattttcctcagagcggggttctcatcttcggaaaacaagactcgggaaaaactaatgtggacattgaaaaggtcatgattacagacgaagaggaaatcaggaccaccaatcccgtggctacggagcagtatggttctgtatctaccaatctccagagcggcaacacacaagcagctacctcagatgtcaacacacaaggcgttcttccaggcatggtctggcaggacagagacgtgtacctgcagggacccatctgggcaaagattccacacacggacggacactttcacccttctcctcttatgggaggatttggactgaagcaccctcccccgcagattctcatcaagagtaccccggtacctgcgaatccttctaccaccttcagcgcggcaaagtttgcttccttcatcacacagtactccacggggcaggtcagcgtggagatcgagtgggagctgcagaaagagaacagcaaacgctggaaccccgagatccagtatacctccaactacaacaagtctgttaatgtggactttactgtggacactaatggcgtgtattcagagcctcgccccattggcacaagatacctgactcgtaatctgtaa

SEQ ID NO: 3396 - DNA, 2208 bp, Artificial Sequence
  source: /note="Description of Artificial Sequence: Synthetic polynucleotide"
atggctgccgatggttatcttccagattggctcgaggacactctctctgaaggaataagacagtggtggaagctcaaacctggcccaccaccgccaaagcccgcagagcggcataaggacgacagcaggggtcttgtgcttcctgggtacaagtacctcggacccttcaacggactcgacaaaggagagccggtcaacgaggcagacgccgcggccctcgagcacgacaaggcctacgaccggcagctcgacagcggagacaacccgtacctcaagtacaaccacgccgacgcggagtttcaggagcgccttaaagaagatacgtcttttgggggcaacctcgcaagagcagtattccaggcgaaaaagagggttcttgaacctctgggcctggttgaggagcctgttaagacggctccgggaaaaaagaggccggtagagcactctcctgcggagctagattcctcctccggaactggaaagtcgggccaacagcctgcaagaaagagattgaattttggtcagactggagacgcagactccgtacctgacccccagcctctcggacagccaccagcagccccctctggtctgggaactaatacgatggcttcaggcagtggcgcaccaatggcagacaataacgagggcgccgacggagtgggtaattcctcgggaaattggcattgcgattccacatggatgggcgacagagtcatcaccaccagcacccgcacctgggctctgcccacctacaacaaccatctgtacaagcaaatttccagccagtctggggccagcaacgacaaccactactttggctacagcaccccttgggggtattttgacttcaacagattccactgccacttctccccacgtgactggcaaagactcatcaacaacaattggggattccggcccaaaagactcaacttcaagctctttaacattcaagtcaaggaggtcacgcagaatgacggtacgacgacgattgccaataaccttaccagcacggttcaggtgtttactgactcggagtaccagctcccgtacgtcctcggctcggcgcatcaaggatgcctcccgccgttcccagcagacgtcttcatggtgccacagtatggatacctcaccctgaacaacgggagtcaggcggtaggacgctcttcattttactgcctggagtactttccttctcagatgctgcgtaccggaaacaactttaccttcagctacacctttgaggacgttccttttcacagcagctacgctcacagccagagtttggaccgtctcatgaatcctctcatcgaccagtacctgtattacttgagcagaacaaacactccaagcggaaccactacgcagtccaggcttcagttttctcaagccggagcgagtgacattcgggaccagtctaggaactggcttcctggaccctgttaccgccagcagcgagtatcaaagacagctgcggacaacaacaacagtgattactcgtggactggagctaccaagtatcacctcaatggaagagactctctggtgaatccgggcacagccatggccagccacaaggacgatgaagaaaagtattttcctcagagcggggttctcatcttcggaaaacaagactcgggaaaaactaatgtggacattgaaaaggtcatgattacagacgaagaggaaatcaggaccaccaatcccgtggctacggagcagtatggttctgtatctaccaatctccagagcggcaacacacaagcagctacctcagatgtcaacacacaaggcgttcttccaggcatggtctggcaggacagagacgtgtacctgcagggacccatctgggcaaagattccacacacggacggacattttcacccttctcctcttatgggaggatttggaccgaagcaccctcccccgcagattctcatcaagaataccccggtacctgcgaatccttctaccaccttcagcgcggcaaagtttgcttccttcatcacacagtactccacggggcaggtcagcgtggagatcgagtgggagctgcagaaagagaacagcaaacgctggaaccccgagatccagtatacctccaactacaacaagtctgttaatgtggactttactgtggacgctaatggcgtgtattcagagcctcgccccattggcacaagatacctgactcgtaatctgtaa

SEQ ID NO: 3397 - DNA, 2208 bp, Artificial Sequence
  source: /note="Description of Artificial Sequence: Synthetic polynucleotide"
atggctgccgatggttatcttccagattggctcgaggacactctctctgaaggaataagacagtggtggaagctcaaacctggcccaccaccgccaaagcccgcagagcggcataaggacgacagcaggggtcttgtgcttcctgggtacaagtacctcggacccttcaacggactcgacaaaggagagccggtcaacgaggcagacgccgcggccctcgagcacgacaaggcctacgaccggcagctcgacagcggagacaacccgtacctcaagtacaaccacgccgacgcggagtttcaggagcgccttaaagaagatacgtcttttgggggcaacctcgcaagagcagtattccaggcgaaaaagagggttcttgaacctctgggcctggttgaggagcctgttaagacggctccgggaaaaaagaggccggtagagcactctcctgcggagctagattcctcctccggaactggaaagtcgggccaacagcctgcaagaaagagattgaattttggtcagactggagacgcagactccgtacctgacccccagcctctcggacagccaccagcagccccctctggtctgggaactaatacgatggcttcaggcagtggcgcaccaatggcagacaataacgagggcgccgacggagtgggtaattcctcgggaaattggcattgcgattccacatggatgggcgacagagtcatcaccaccagcacccgcacctgggctctgcccacctacaacaaccatctgtacaagcaaatttccagccagtctggggccagcaacgacaaccactactttggctacagcaccccttgggggtattttgacttcaacagattccactgccacttctccccacgtgactggcaaagactcatcaacaacaattggggattccggcccaaaagactcaacttcaagctctttaacattcaagtcaaggaggtcacgcagaatgacggtacgacgacgattgccaataaccttaccagcacggttcaggtgtttactgactcggagtaccagctcccgtacgtcctcggctcggcgcatcaaggatgcctcccgccgttcccagcagacgtcttcatggtgccacagtatggatacctcaccctgaacaacgggagtcaggcggtaggacgctcttcattttactgcctggagtactttccttctcagatgctgcgtaccggaaacaactttaccttcagctacacctttgaggacgttccttttcacagcagctacgctcacagccagagtttggaccgtctcatgaatcctctcatcgaccagtacctgtattacttgagcagaacaaacactccaagcggaaccactacgcagtccaggcttcagttttctcaagccggagcgagtgacattcgggaccagtctaggaactggcttcctggaccctgttaccgccagcagcgagtatcaaagacagctgcggacaacaacaacagtgattactcgtggactggagctaccaagtatcacctcaatggaagagactctctggtgaatccgggcacagccatggccagccacaaggacgatgaagaaaagtattttcctcagagcggggttctcatcttcggaaaacaagactcgggaaaaactaatgtggacattgaaaaggtcatgattacagacgaagaggaaatcaggaccaccaatcccgtggctacggagcagtatggttctgtatctaccaatctccggagcggcaacacacaagcagctacctcagatgtcaacacacaaggcgttcttccaggcatggtctggcaggacagagacgtgtacctgcagggacccatctgggcaaagattccacacacggacggacattttcacccttctcctcttatgggaggatttggaccgaagcaccctcccccgcagattctcatcaagaataccccggtacctgcgaatccttctaccaccttcagcgcggcaaagtttgcttccttcatcacacagtactccacggggcaggtcagcgtggagatcgagtgggagctgcagaaagagaacagcaaacgctggaaccccgagatccagtatacctccaactacaacaagtctgttaatgtggactttactgtggacactaatggcgtgtattcagagcctcgccccattggcacaagatacctgactcgtaatctgtaa

SEQ ID NO: 3398 - DNA, 2208 bp, Artificial Sequence
  source: /note="Description of Artificial Sequence: Synthetic polynucleotide"
atggctgccgatggttatcttccagattggctcgaggacactctctctgaaggaataagacagtggtggaagctcaaacctggcccaccaccgccaaagcccgcagagcggcataaggacgacagcaggggtcttgtgcttcctgggtacaagtacctcggacccttcaacggactcgacaaaggagagccggtcaacgaggcagacgccgcggccctcgagcacgacaaggcctacgaccggcagctcgacagcggagacaacccgtacctcaagtacaaccacgccgacgcggagtttcaggagcgccttaaagaagatacgccttttgggggcaacctcgcaagagcagtattccaggcgaaaaagagggttcttgaacctctgggcctggttgaggagcctgttaagacggctccgggaaaaaagaggccggtagagcactctcctgcggagctagattcctcctccggaactggaaagtcgggccaacagcctgcaagaaagagattgaattttggtcagactggagacgcagactccgtacctgacccccagcctctcggacagccaccagcagccccctctggtctgggaactaatacgatggcttcaggcagtggcgcaccaatggcagacaataacgagggcgccgacggagtgggtaattcctcgggaaattggcattgcgattccacatggatgggcgacagagtcatcaccaccagcacccgcacctgggctctgcccacctacaacaaccatctgtacaagcaaatttccagccagtctggggccagcaacgacaaccactactttggctacagcaccccttgggggtattttgacttcaacagattccactgccacttctccccacgtgactggcaaagactcatcaacaacaattggggattccggcccaaaggactcaacttcaagctctttaacattcaagtcaaggaggtcacgcagaatgacggtacgacgacgattgccaataaccttaccagcacggttcaggtgtttactgactcggagtaccagctcccgtacgtcctcggctcggcgcatcaaggatgcctcccgccgttcccagcagacgtcttcatggtgccacagtatggatacctcaccctgaacaacgggagtcaggcggtaggacgctcttcattttactgcctggagtactttccttctcagatgctgcgtaccggaaacaactttaccttcagctacacctttgaggacgttccttttcacagcagctacgctcacagccagagtttggaccgtctcatgaatcctctcatcgaccagtacctgtattacttgagcagaacaaacactccaagcggaaccactacgcagtccaggcttcagttttctcaagccggagcgagtgacattcgggaccagtctaggaactggcttcctggaccctgttaccgccagcagcgagtatcaaagacagctgcggacaacaacaacagtgattactcgtggactggagctaccaagtatcacctcaatggaagagactctctggtgaatccgggcacagccatggccagccacaaggacgatgaagaaaagtattttcctcagagcggggttctcatcttcggaaaacaagactcgggaaaaactaatgtggacattgaaaaggtcatgattacagacgaagaggaaatcaggaccaccaatcccgtggctacggagcagtatggttctgtatctaccaatctccagagcggcaacacacaagcagctacctcagatgtcaacacacaaggcgttcttccaggcatggtctggcaggacagagacgtgtacctgcagggacccatctgggcaaagattccacacacggacggacattttcacccttctcctcttatgggaggatttggaccgaagcaccctcccccgcagattctcatcaagaataccccggtacctgcgaatccttctaccaccttcagcgcggcaaagtttgcttccttcatcacacagtactccacggggcaggtcagcgtggagatcgagtgggagctgcagaaagagaacagcaaacgctggaaccccgagatccagtatacctccaactacaacaagtctgttaatgtggactttactgtggacactaatggcgtgtattcagagcctcgccccattggcacaagatacctgactcgtaatctgtaa

SEQ ID NO: 3399 - DNA, 2208 bp, Artificial Sequence
  source: /note="Description of Artificial Sequence: Synthetic polynucleotide"
atggctgccgatggttatcttccagattggctcgaggacactctctctgaaggaataagacagtggtggaagctcaaacctggcccaccaccgccaaagcccgcagagcggcataaggacgacagcaggggtcttgtgcttcctgggtacaagtacctcggacccttcaacggactcgacaaaggagagccggtcaacgaggcagacgccgcggccctcgagcacgacaaggcctacgaccggcagctcgacagcggagacaacccgtacctcaagtacaaccacgccgacgcggagtttcaggagcgccttaaagaagatacgtcttttgggggcaacctcgcaagagcagtattccaggcgaaaaagagggttcttgaacctctgggcctggttgaggagcctgttaagacggctccgggaaaaaagaggccggtagagcactctcctgcggagctagattcctcctccggaactggaaagtcgggccaacagcctgcaagaaagagattgaattttggtcagactggagacgcagactccgtacctgacccccagcctctcggacagccaccagcagccccctctggtctgggaactaatacgatggcttcaggcagtggcgcaccaatggcagacaataacgagggcgccgacggggtgggtaattcctcgggaaattggcattgcgattccacatggatgggcgacagagtcatcaccaccagcacccgcacctgggctctgcccacctacaacaaccatctgtacaagcaaatttccagccagtctggggccagcaacgacaaccactaccttggctacagcaccccttgggggtattttgacttcaacagattccactgccacttctccccacgtgactggcaaagactcatcaacaacaattggggattccggcccaaaagactcaacttcaagctctttaacattcaagtcaaggaggtcacgcagaatgacggtacgacgacgattgccaataaccttaccagcacggttcaggtgtttactgactcggagtaccagctcccgtacgtcctcggctcggcgcatcaaggatgcctcccgccgttcccagcagacgtcttcatggtgccacagtatggatacctcaccctgaacaacgggagtcaggcggtaggacgctcttcattttactgcctggagtactttccttctcagatgctgcgtaccggaaacaactttaccttcagctacacctttgaggacgttccttttcacagcagctacgctcacagccagagtttggaccgtctcatgaatcctctcatcgaccagtacctgtattacttgagcagaacaaacactccaagcggaaccactacgcagtccaggcttcagttttctcaagccggagcgagtggcattcgggaccagtctaggaactggcttcctggaccctgttaccgccagcagcgagtatcaaagacagctgcggacaacaacaacagtgattactcgtggactggagctaccaagtatcacctcaatggaagagactctctggtgaatccgggcacagccatggccagccacaaggacgatgaagaaaagtattttcctcagagcggggttctcatcttcggaaaacaagactcgggaaaaactaatgtggacattgaaaaggtcatgattacagacgaagaggaaatcaggaccaccaatcccgtggctacggagcagtatggttctgtatctaccaatctccagagcggcaacacacaagcagctacctcagatgtcaacacacaaggcgttcttccaggcatggtctggcaggacagagacgtgtacctgcagggacccatctgggcaaagattccacacacggacggacattttcacccttctcctcttatgggaggatttggaccgaagcaccctcccccgcagattctcatcaagaataccccggtacctgcgaatccttctaccaccttcagcgcggcaaagtttgcttccttcatcacacagtactccacggggcaggtcagcgtggagatcgagtgggagctgcagaaagggaacagcaaacgctggaaccccgagatccagtatacctccaactacaacaagtctgttaatgtggactttactgtggacactaatggcgtgtattcagagcctcgccccattggcacaagatacctgactcgtaatctgtaa

SEQ ID NO: 3400 - DNA, 2208 bp, Artificial Sequence
  source: /note="Description of Artificial Sequence: Synthetic polynucleotide"
atggctgccgatggttatcttccagattggctcgaggacactctctctgaaggaataagacagtggtggaagctcaaacctggcccaccaccgccaaagcccgcagagcggcataaggacgacagcaggggtcttgtgcttcctgggtacaagtacctcggacccttcaacggactcgacaaaggagagccggtcaacgaggcagacgccgcggccctcgagcacgacaaggcctacgaccggcagctcgacagcggagacaacccgtacctcaagtacaaccacgccgacgcggagtttcaggagcgccttaaagaagatacgtcttttgggggcaacctcgcaagagcagtattccaggcgaaaaagagggttcttgaacctctgggcctggttgaggagcctgttaagacggctccgggaaaaaagaggccggtagagcactctcctgcggagctagattcctcctccggaactggaaagtcgggccaacagcctgcaagaaagagattgaattttggtcagactggagacgcagactccgtacctgacccccagcctctcggacagccaccagcagccccctctggtctgggaactaatacgatggcttcaggcagtggcgcaccaatggcagacaataacgagggcgccgacggagtgggtaattcctcgggaaattggcattgcgattccacatggatgggcgacagagtcatcaccaccagcacccgcacctgggctctgcccacctacaacaaccatctgtacaagcaaatttccagccagtctggggccagcaacgacaaccactactttggctacagcaccccttgggggtattttgacttcaacagattccactgccacttctccccacgtgactggcaaagactcatcaacaacaattggggattccggcccaaaagactcaacttcaagctctttaacattcaagtcaaggaggtcacgcagaatgacggtacgacgacgattgccaataaccttaccagcacggttcaggtgtttactgactcggagtaccagctcccgtacgtcctcggctcggcgcatcaaggatgcctcccgccgttcccagcagacgtcttcatggtgccacagtatggatacctcaccctgaacaacgggagtcaggcggtaggacgctcttcattttactgcctggagtactttccttctcagatgctgcgtaccggaaacaactttaccttcagctacacctttgaggacgttccttttcacagcagctacgctcacagccagagtttggaccgtctcatgaatcctctcatcgaccagtacctgtattacttgagcagaacaaacactccaagcggaaccactacgcagtccaggcttcagttttctcaagccggagcgagtgacattcgggaccagtctaggaactggcttcctggaccctgttaccgccagcagcgagtatcaaagacagctgcggacaacaacaacagtgattactcgtggactggagctaccaagtatcacctcaatggaagagactctctggtgaatccgggcacagccatggccagccacaaggacgatgaagaaaagtattttcctcagagcggggttctcatcttcggaaaacaagactcgggaaaaactaatgtggacattgaaaaggtcatgattacagacgaagaggaaatcaggaccaccaatcccgtggctacggagcagtatggttctgtatctaccaatctccagagcggcaacacacaagcagctacctcagatgtcaacacacaaggcgttcttccaggcatggtctggcaggacagagacgtgtacctgcagggacccatctgggcaaagattccacacacggacggacattttcacccttctcctcttatgggaggatttggaccgaagcaccctcccccgcagattctcatcaagaataccccggtacctgcgaatccttctaccaccttcagcgcggcaaagtttgcttccttcatcacacagtactccacggggcaggtcagcgtggagatcgagtgggagctgcagaaagagaacagcaaacgctggaaccccgagatccagtatacctccaactacaacaagtctgttaatgtggactttactgtggacactaatggcgtgtattcagagcctcgccccattggcacaagatacccgactcgtaatctgtaa

SEQ ID NO: 3401 - DNA, 2208 bp, Artificial Sequence
  source: /note="Description of Artificial Sequence: Synthetic polynucleotide"
atggctgccgatggttatcttccagattggctcgaggacactctctctgaaggaataagacagtggtggaagctcaaacctggcccaccaccgccaaagcccgcagagcggcataaggacgacagcaggggtcttgtgcttcctgggtacaagtacctcggacccttcaacggactcgacaaaggagagccggtcaacgaggcagacgccgcggccctcgagcacgacaaggcctacgaccggcagctcgacagcggagacaacccgtacctcaagtacaaccacgccgacgcggagtttcaggagcgccttaaagaagatacgtcttttgggggcaacctcgcaagagcagtattccaggcgaaaaagagggttcttgaacctctgggcctggttgaggagcctgttaagacggctccgggaaaaaagaggccggtagagcactctcctgcggagctagattcctcctccggaactggaaagtcgggccaacagcctgcaagaaagagattgaattttggtcagactggagacgcagactccgtacctgacccccagcctctcggacagccaccagcagccccctctggtctgggaactaatacgatggcttcaggcagtggcgcaccaatggcagacaataacgagggcgccgacggagtgggtaattcctcgggaaattggcattgcgattccacatggatgggcgacagagtcatcaccaccagcacccgcacctgggctctgcccacctacaacaaccatctgtacaagcaaatttccagccagtctggggccagcaacgacaaccactactttggctacagcaccccttgggggtattttgacttcaacagattccactgccacttctccccacgtgactggcaaagactcatcaacaacaattggggattccggcccaaaagactcaacttcaagctctttaacattcaagtcaaggaggtcacgcagaatgacggtacgacgacgattgccaataaccttaccagcacggttcaggtgtttactgactcggagtaccagctcccgtacgtcctcggctcggcgcatcaaggatgcctcccgccgttcccagcagacgtcttcatggtgccacagtatggatacctcaccctgaacaacgggagtcaggcggtaggacgctcttcattttactgcctggagtactttccttctcagatgctgcgtaccggaaacaactttaccttcagctacacctttgaggacgttccttttcacagcagctacgctcacagccagagtttggaccgtctcatgaatcctctcatcgaccagtacctgtattacttgagcagaacaaacactccaagcggaaccactacgcagtccaggcttcagttttctcaagccggagcgagtgacattcgggaccagtctaggaactggcttcctggaccctgttaccgccagcagcgagtatcaaagacagctgcggacaacaacaacagtgattactcgtggactggagctaccaagtatcacctcaatggaagagactctctggtgaatccgggcacagccatggccagccacaaggacgatgaagaaaagtattttcctcagagcggggttctcatcttcggaaaacaagactcgggaaaaactaatgtggacattgaaaaggtcatgattacagacgaagaggaaatcaggaccaccaatcccgtggctacggagcagtatggttctgtatctaccaatctccagagcggcaacacacaagcagctacctcagatgtcaacacacaaggcgttcttccaggcatggtctggcaggacagagacgtgtacctgcagggacccatctgggcaaagattccacacacggacggacattttcacccttctcctcttatgggaggatttggaccgaagcaccctcccccgcagattctcatcaagaataccccggtacctgcgaatccttctaccaccttcagcgcggcaaagcttgcttccttcatcacacagtactccacggggcaggtcagcgtggagatcgagtgggagctgcagaaagagaacagcaaacgctggaaccccgagatccagtatacctccaactacaacaagtctgttaatgtggactttactgtggacactaatggcgtgtattcagagcctcgccccattggcacaagatacctgactcgtaatctgtaa

SEQ ID NO: 3402 - DNA, 2208 bp, Artificial Sequence
  source: /note="Description of Artificial Sequence: Synthetic polynucleotide"
atggctgccgatggttatcttccagattggctcgaggacactctctctgaaggaataagacagtggtggaagctcaaacctggcccaccaccgccaaagcccgcagagcggcataaggacgacagcaggggtcttgtgcttcctgggtacaagtacctcggacccttcaacggactcgacaaaggagagccggtcaacgaggcagacgccgcggccctcgagcacgacaaggcctacgaccggcagctcgacagcggagacaacccgtacctcaagtacaaccacgccgacgcggagtttcaggagcgccttaaagaagatacgtcttttgggggcaacctcgcaagagcagtattccaggcgaaaaagagggttcttgaacctctgggcctggttgaggagcctgttaagacggctccgggaaaaaagaggccggtagagcactctcctgcggagctagattcctcctccggaactggaaagtcgggccaacagcctgcaagaaagagattgaattttggtcagactggagacgcagactccgtacctgacccccagcctctcggacagccaccagcagccccctctggtctgggaactaatacgatggcttcaggcagtggcgcaccaatggcagacaataacgagggcgccgacggagtgggtaattcctcgggaaattggcattgcgattccacatggatgggcgacagagtcatcaccaccagcacccgcacctgggctctgcccacctacaacaaccatctgtacaagcaaatttccagccagtctggggccagcaacgacaaccactactttggctacagcaccccttgggggtattttgacttcaacagattccactgccacttctccccacgtgactggcaaagactcatcaacaacaattggggattccggcccaaaagactcaacttcaagctctttaacattcaagtcaaggaggtcacgcagaatgacggtacgacgacgattgccaataaccttaccagcacggttcaggtgtttactgactcggagtaccagctcccgtacgtcctcggctcggcgcatcaaggatgcctcccgccgttcccagcagacgtcttcatggtgccacagtatggatacctcaccctgaacaacgggagtcaggcggtaggacgctcttcattttactgcctggagtactttccttctcagatgctgcgtaccggaaacaactttaccttcagctacacctttgaggacgttccttttcacagcagctacgctcacagccagagtttggaccgtctcatgaatcctctcatcgaccagtacctgtattacttgagcagaacaaacactccaagcggaaccactacgcagtccaggcttcagttttctcaagccggagcgagtgacattcgggaccagtctaggaactggcttcctggaccctgttaccgccagcagcgagtatcaaagacagctgcggacaacaacaacagtgattactcgtggactggagctaccaagtatcacctcaatggaagagactctctggtgaatccgggcacagccatggccagccacaaggacgatgaagaaaagtattttcctcagagcggggttctcatcttcggaaaacaagactcgggaaaaactaatgtggacattgaaaaggtcatgattacagacgaagaggaaatcaggaccaccaatcccgtggctacggagcagtatggttctgtatctaccaatctccagagcggcaacacacaagcagctacctcagatgtcaacacacaaggcgttcttccaggcatggtctggcaggacagagacgtgtacctgcagggacccatctgggcaaagattccacacacggacggacattttcacccttctcctcttatgggaggatttggaccgaagcaccctcccccgcagattctcatcaagaataccccggtacctgcgaatccttctaccaccttcagcgcggcaaagtttgcttccttcaccacacagtactccacggggcaggtcagcgtggagatcgagtgggagctgcagaaagagaacagcaaacgctggaaccccgagatccagtatacctccaactacaacaagtctgttaatgtggactttactgtggacactaatggcgtgtattcagagcctcgccccattggcacaagatacctgactcgtaatctgtaa

SEQ ID NO: 3403 - DNA, 2208 bp, Artificial Sequence
  source: /note="Description of Artificial Sequence: Synthetic polynucleotide"
atggctgccgatggttatcttccagattggctcgaggacactctctctgaaggaataagacagtggtggaagctcaaacctggcccaccaccgccaaagcccgcagagcggcataaggacgacagcaggggtcttgtgcttcctgggtacaagtacctcggacccttcaacggactcgacaaaggagagccggtcaacgaggcagacgccgcggccctcgagcacgacaaggcctacgaccggcagctcgacagcggagacaacccgtacctcaagtacaaccacgccgacgcggagtttcaggagcgccttaaagaagatacgtcttttgggggcaacctcgcaagagcagtattccaggcgaaaaagagggttcttgaacctctgggcctggttgaggagcctgttaagacggctccgggaaaaaagaggccggtagagcactctcctgcggagctagattcctcctccggaactggaaagtcgggccaacagcctgcaagaaagagattgaattttggtcagactggagacgcagactccgtacctgacccccagcctctcggacagccaccagcagccccctctggtctgggaactaatacgatggcttcaggcagtggcgcaccaatggcagacaataacgagggcgccgacggagtgggtaattcctcgggaaattggcattgcgattccacatggatgggcgacagagtcatcaccaccagcacccgcacctgggctctgcccacctacaacaaccatctgtacaagcaaatttccagccagtctggggccagcaacgacaaccactactttggctacagcaccccttgggggtattttgacttcaacagattccactgccacttctccccacgtgactggcaaagactcatcaacaacaattggggattccggcccaaaagactcaacttcaagctctttaacattcaagtcaaggaggtcacgcagaatgacggtacgacgacgattgccaataaccttaccagcacggttcaggtgtttactgactcggagtaccagctcccgtacgtcctcggctcggcgcatcaaggatgcctcccgccgttcccagcagacgtcttcatggtgccacagtatggatacctcaccctgaacaacgggagtcaggcggtaggacgctcttcattttactgcctggagtactttccttctcagatgctgcgtaccggaaacaactttaccttcagctacacctttgaggacgttccttttcacagcagctacgctcacagccagagtttggaccgtctcatgaatcctctcatcgaccagtacctgtattacttgagcagaacaaacactccaagcggaaccactacgcagtccaggcttcagttttctcaagccggagcgagtgacattcgggaccagtctaggaactggcttcctggaccctgttaccgccagcagcgagtatcaaagacagctgcggacaacaacaacagtgattactcgtggactggagctaccaagtatcacctcaatggaagagactctctggtgaatccgggcacagccatggccagccacaaggacgatgaagaaaagtattttcctcggagcggggttctcatcttcggaaaacaagactcgggaaaaactaatgtggacattgaaaaggtcatgattacagacgaagaggaaatcaggaccaccaatcccgtggctacggagcagtatggttctgtatctaccaatctccagagcggcaacacacaagcagctacctcagatgtcaacacacaaggcgttcttccaggcatggtctggcaggacagagacgtgtacctgcagggacccatctgggcaaagattccacacacggacggacattttcacccttctcctcttatgggaggatttggaccgaagcaccctcccccgcagattctcatcaagaataccccggtacctgcgaatccttctaccaccttcagcgcggcaaagtttgcttccttcatcacacagtactccacggggcaggtcagcgtggagatcgagtgggagctgcagaaagagaacagcaaacgctggaaccccgagatccagtatacctccaactacaacaagtctgttaatgtggactttactgtggacactaatggcgtgtattcagagcctcgccccattggcacaagatacctgactcgtaatctgtaa

SEQ ID NO: 3404 - DNA, 2208 bp, Artificial Sequence
  source: /note="Description of Artificial Sequence: Synthetic polynucleotide"
atggctgccgatggttatcttccagattggctcgaggacactctctctgaaggaataagacagtggtggaagctcaaacctggcccaccaccgccaaagcccgcagagcggcataaggacgacagcaggggtcttgtgcttcctgggtacaagtacctcggacccttcaacggactcgacaaaggagagccggtcaacgaggcagacgccgcggccctcgagcacgacaaggcctacgaccggcagctcgacagcggagacaacccgtacctcaagtacaaccacgccgacgcggagtttcaggagcgccttaaagaagatacgtcttttgggggcaacctcgcaagagcagtattccaggcgaaaaagagggttcttgaacctctgggcctggttgaggagcctgttaagacggctccgggaaaaaagaggccggtagagcactctcctgcggagctagattcctcctccggaactggaaagtcgggccaacagcctgcaagaaagagattgaattttggtcagactggagacgcagactccgtacctgacccccagcctctcggacagccaccagcagccccctctggtctgggaactaatacgatggcttcaggcagtggcgcaccaatggcagacaataacgagggcgccgacggagtgggtaattcctcgggaaattggcattgcgattccacatggatgggcgacagagtcatcaccaccagcacccgcacctgggctctgcccacctacaacaaccatctgtacaagcaaatttccagccagtctggggccagcaacgacaaccactactttggctacagcaccccttgggggtattttgacttcaacagattccactgccacttctccccacgtgactggcaaagactcatcaacaacaattggggattccggcccaaaagactcaacttcaagctctttaacattcaagtcaaggaggtcacgcagaatgacggtacggcgacgattgccaataaccttaccagcacggttcaggtgtttactgactcggagtaccagctcccgtacgtcctcggctcggcgcatcaaggatgcctcccgccgttcccagcagacgtcttcatggtgccacagtatggatacctcaccctgaacaacgggagtcaggcggtaggacgctcttcattttactgcctggagtactttccttctcagatgctgcgtaccggaaacaactttaccttcagctacacctttgaggacgttccttttcacagcagctacgctcacagccagagtttggaccgtctcatgaatcctctcatcgaccagtacctgtattacttgagcagaacaaacactccaagcggaaccactacgcagtccaggcttcagttttctcaagccggagcgagtgacattcgggaccagtctaggaactggcttcctggaccctgttaccgccagcagcgagtatcaaagacagctgcggacaacaacaacagtgattactcgtggactggagctaccaagtatcacctcaatggaagagactctctggtgaatccgggcacagccatggccagccacaaggacgatgaagaaaagtattttcctcagagcggggttctcatcttcggaaaacaagactcgggaaaaactaatgtggacattgaaaaggtcatgattacagacgaagaggaaatcaggaccaccaatcccgtggctacggagcagtatggttctgtatctaccaatctccagagcggcaacacacaagcagctacctcagatgtcaacacacaaggcgttcttccaggcatggtctggcaggacagagacgtgtacctgcagggacccatctgggcaaagattccacacacggacggacattttcacccttctcctcttatgggaggatttggaccgaagcaccctcccccgcagattctcatcaagaataccccggtacctgcgaatccttctaccaccttcagcgcggcaaagtttgcttccttcatcacacagtactccacggggcaggtcagcgtggagatcgagtgggagctgcagaaagagaacagcaaacgctggaaccccgagatccagtatacctccaactacaacaagtctgttaatgtggactttactgtggacactaatggcgtgtattcagagcctcgccccattggcacaagatacctgactcgtaatctgtaa

SEQ ID NO: 3405 - DNA, 2208 bp, Artificial Sequence
  source: /note="Description of Artificial Sequence: Synthetic polynucleotide"
atggctgccgatggttatcttccagattggctcgaggacactctctctgaaggaataagacagtggtggaagctcaaacctggcccaccaccgccaaagcccgcagagcggcataaggacgacagcaggggtcttgtgcttcctgggtacaagtacctcggacccttcaacggactcgacaaaggagagccggtcaacgaggcagacgccgcggccctcgagcacgacaaggcctacgaccggcagcccgacagcggagacaacccgtacctcaagtacaaccacgccgacgcggagtttcaggagcgccttaaagaagatacgtcttttgggggcaacctcgcaagagcagtattccaggcgaaaaagagggttcttgaacctctgggcctggttgaggagcctgttaagacggctccgggaaaaaagaggccggtagagcactctcctgcggagctagattcctcctccggaactggaaagtcgggccaacagcctgcaagaaagagattgaattttggtcagactggagacgcagactccgtacctgacccccagcctctcggacagccaccagcagccccctctggtctgggaactaatacgatggcttcaggcagtggcgcaccaatggcagacaataacgagggcgccgacggagtgggtaattcctcgggaaattggcattgcgattccacatggatgggcgacagagtcatcaccaccagcacccgcacctgggctctgcccacctacaacaaccatctgtacaagcaaatttccagccagtctggggccagcaacgacaaccactactttggctacagcaccccttgggggtattttgacttcaacagattccactgccacttctccccacgtgactggcaaagactcatcaacaacaattggggattccggcccaaaagactcaacttcaagctctttaacattcaagtcaaggaggtcacgcagaatgacggtacgacgacgattgccaataaccttaccagcacggttcaggtgtttactgactcggagtaccagctcccgtacgtcctcggctcggcgcatcaaggatgcctcccgccgttcccagcagacgtcttcatggtgccacagtatggatacctcaccctgaacaacgggagtcaggcggtaggacgctcttcattttactgcctggagtactttccttctcagatgctgcgtaccggaaacaactttaccttcagctacacctttgaggacgttccttttcacagcagctacgctcacagccagagtttggaccgtctcatgaatcctctcatcgaccagtacctgtattacttgagcagaacaaacactccaagcggaaccactacgcagtccaggcttcagttttctcaagccggagcgagtgacattcgggaccagtctaggaactggcttcctggaccctgttaccgccagcagcgagtatcaaagacagctgcggacaacaacaacagtgattactcgtggactggagctaccaagtatcacctcaatggaagagactctctggtgaatccgggcacagccatggccagccacaaggacgatgaagaaaagtattttcctcagagcggggttctcatcttcggaaaacaagactcgggaaaaactaatgtggacattgaaaaggtcatgattacagacgaagaggaaatcaggaccaccaatcccgtggctacggagcagtatggttctgtatctaccaatctccagagcggcaacacacaagcagctacctcagatgtcaacacacaaggcgttcttccaggcatggtctggcaggacagagacgtgtacctgcagggacccatctgggcaaagattccacacacggacggacattttcacccttctcctcttatgggaggatttggaccgaagcaccctcccccgcagattctcatcaagaataccccggtacctgcgaatccttctaccaccttcagcgcggcaaagtttgcttccttcatcacacagtactccacggggcaggtcagcgtggagatcgagtgggagctgcagaaagagaacagcaaacgctggaaccccgagatccagtatacctccaactacaacaagtctgttaatgtggactttactgtggacactaatggcgtgtattcagagcctcgccccattggcacaagatacctgactcgtaatctgtaa

SEQ ID NO: 3406 - DNA, 2208 bp, Artificial Sequence
  source: /note="Description of Artificial Sequence: Synthetic polynucleotide"
atggctgccgatggttatcttccagattggctcgaggacactctctctgaaggaataagacagtggtggaagctcgaacctggcccaccaccgccaaagcccgcagagcggcataaggacgacagcaggggtcttgtgcttcctgggtacaagtacctcggacccttcaacggactcgacaaaggagagccggtcaacgaggcagacgccgcggccctcgagcacgacaaggcctacgaccggcagctcgacagcggagacaacccgtacctcaagtacaaccacgccgacgcggagtttcaggagcgccttaaagaagatacgccttttgggggcaacctcgcaagagcagtattccaggcgaaaaagagggttcttgaacctctgggcctggttgaggagcctgttaagacggctccgggaaaaaagaggccggtagagcactctcctgcggagctagattcctcctccggaactggaaagtcgggccaacagcctgcaagaaagagattgaattttggtcagactggagacgcagactccgtacctgacccccagcctctcggacagccaccagcagccccctctggtctgggaactaatacgatggcttcaggcagtggcgcaccaatggcagacaataacgagggcgccgacggagtgggtaattcctcgggaaattggcattgcgattccacatggatgggcgacagagtcatcaccaccagcacccgcacctgggctctgcccacctacaacaaccatctgtacaagcaaatttccagccagtctggggccagcaacgacaaccactactttggctacagcaccccttgggggtattttgacttcaacagattccactgccacttctccccacgtgactggcaaagactcatcaacaacaattggggattccggcccaaaagactcaacttcaagctctttaacattcaagtcaaggaggtcacgcagaatgacggtacgacgacgattgccaataaccttaccagcacggttcaggtgtttactgactcggagtaccagctcccgtacgtcctcggctcggcgcatcaaggatgcctcccgccgttcccagcagacgtcttcatggtgccacagtatggatacctcaccctgaacaacgggagtcaggcggtaggacgctcttcattttactgcctggagtactttccttctcagatgctgcgtaccggaaacaactttaccttcagctacacctttgaggacgttccttttcacagcagctacgctcacagccagagtttggaccgtctcatgaatcctctcatcgaccagtacctgtattacttgagcagaacaaacactccaagcggaaccactacgcagtccaggcttcagttttctcaagccggagcgagtgacattcgggaccagtctaggaactggcttcctggaccctgttatcgccagcagcgagtatcaaagacagctgcggacaacaacaacagtgattactcgtggactggagctaccaagtatcacctcaatggaagagactctctggtgaatccgggcacagccatggccagccacgaggacgatgaagaaaagtattttcctcagagcggggttctcatcttcggaaaacaagactcgggaaaaactaatgtggacattgaaaaggtcatgattacagacgaagaggaaatcaggaccaccaatcccgtggctacggagcagtatggttctgtatctaccaatctccagagcggcaacacacaagcagctacctcagatgtcaacacacaaggcgttcttccaggcatggtctggcaggacagagacgtgtacctgcagggacccatctgggcaaagattccacacacggacggacattttcacccttctcctcttatgggaggatttggaccgaagcaccctcccccgcagattctcatcaagaataccccggtacctgcgaatccttctaccaccttcagcgcggcaaagtttgcttccttcatcacacagtactccacggggcaggtcagcgtggagatcgagtgggagctgcagaaagagaacagcaaacgctggaaccccgagatccagtatacctccaactacaacaagtctgttaatgtggactttactgtggacactaatggcgtgtattcagagcctcgccccattggcacaagatacctgactcgtaatctgtaa

SEQ ID NO: 3407 - DNA, 2205 bp, Artificial Sequence
  source: /note="Description of Artificial Sequence: Synthetic polynucleotide"
atggctgccgatggttatcttccagattggctcgaggacactctctctgaaggaataagacagtggtggaagctcaaacctggcccaccaccgccaaagcccgcagagcggcataaggacgacagcaggggtcttgtgcttcctgggtacaagtacctcggacccttcaacggactcgacaaaggagagccggtcaacgaggcagacgccgcggccctcgagcacgacaaggcctacgaccggcagctcgacagcggagacaacccgtacctcaagtacaaccacgccgacgcggagtttcaggagcgccttaaagaagatacgtcttttgggggcaacctcgcaagagcagtattccaggcgaaaaagagggttcttgaacctctgggcctggttgaggagcctgttaagacggctccgggaaaaaagaggccggtagagcactctcctgcggagctagattcctcctccggaactggaaagtcgggccaacagcctgcaagaaagagattgaattttggtcagactggagacgcagactccgtacctgacccccagcctctcggacagccaccagcagccccctctggtctgggaactaatacgatggcttcaggcagtggcgcaccaatggcagacaataacgagggcgccgacggagtgggtaattcctcgggaaattggcattgcgattccacatggatgggcgacagagtcatcaccaccagcacccgcacctgggctctgcccacctacaacaaccatctgtacaagcaaatttccagccagtctggggccagcaacgacaaccactactttggctacagcaccccttgggggtattttgacttcaacagattccactgccacttctccccacgtgactggcaaagactcatcaacaacaattggggattccggcccaaaagactcaacttcaagctctttaacattcaagtcaaggaggtcacgcagaatgacggtacgacgacgattgccaataaccttaccagcacggttcaggtgtttactgactcggagtaccagctcccgtacgtcctcggctcggcgcatcaaggatgcctcccgccgttcccagcagacgtcttcatggtgccacagtatggatacctcaccctgaacaacgggagtcaggcggtaggacgctcttcattttactgcctggagtactttccttctcagatgctgcgtaccggaaacaactttaccttcagctacacctttgaggacgttccttttcacagcagctacgctcacagccagagtttggaccgtctcatgaatcctctcatcgaccagtacctgtattacttgagcagaacaaacactccaagcggaaccactacgcagtccaggcttcagttttctcaagccggagcgagtgacattcgggaccagtctaggaactggcttcctggaccctgttaccgccagcagcgagtatcaaagacagctgcggacaacaacagtgattactcgtggactggagctaccaagtatcacctcaatggaagagactctctggtgaatccgggcacagccatggccagccacaaggacgatgaagaaaagtattttcctcagagcggggttctcatcttcggaaaacaagactcgggaaaaactaatgtggacattgaaaaggtcatgattacagacgaagaggaaatcaggaccaccaatcccgtggctacggagcagtatggttctgtatctaccaatctccagagcggcaacacacaagcagctacctcagatgtcaacacacaaggcgttcttccaggcatggtctggcaggacagagacgtgtacctgcagggacccatctgggcaaagattccacacacggacggacattttcacccttctcctcttatgggaggatttggaccgaagcaccctcccccgcagattctcatcaagaataccccggtacctgcgaatccttctaccaccttcagcgcggcaaagtttgcttccttcatcacacagtactccacggggcaggtcagcgtggagatcgagtgggagctgcagaaagagaacagcaaacgctggaaccccgagatccagtatacctccaactacaacaagtctgttaatgtggactttactgtggacactaatggcgtgtattcagagcctcgccccattggcacaagatacctgactcgtaatctgtaa

SEQ ID NO: 3408 - DNA, 2208 bp, Artificial Sequence
  source: /note="Description of Artificial Sequence: Synthetic polynucleotide"
atggctgccgatggttatcttccagattggctcgaggacactctctctgaaggaataagacagtggtggaagctcaaacctggcccaccaccgccaaagcccgcagagcggcataaggacgacagcaggggtcttgtgcttcctgggtacaagtacctcggacccttcaacggactcgacaaaggagagccggtcaacgaggcagacgccgcggccctcgagcacgacaaggcctacgaccggcagctcgacagcggagacaacccgtacctcaagtacaaccacgccgacgcggagtttcaggagcgccttaaagaagatacgccttttgggggcaacctcgcaagagcagtattccaggcgaaaaagagggttcttgaacctctgggcctggttgaggagcctgttaagacggctccgggaaaaaagaggccggtagagcactctcctgcggagctagattcctcctccggaactggaaagtcgggccaacagcctgcaagaaagagattgaattttggtcagactggagacgcagactccgtacctgacccccagcctctcggacagccaccagcagccccctctggtctgggaactaatacgatggcttcaggcagtggcgcaccaatggcagacaataacgagggcgccgacggagtgggtaattcctcgggaaattggcattgcgattccacatggatgggcgacagagtcatcaccaccagcacccgcacctgggctctgcccacctacaacaaccatctgtacaagcaaatttccagccagtctggggccagcaacgacaaccactactttggctacagcaccccttgggggtattttgacttcaacagattccactgccacttctccccacgtgactggcaaagactcatcaacaacaattggggattccggcccaaaagactcaacttcaagctctttaacattcaagtcaaggaggtcacgcagaatggcggtacgacgacgattgccaataaccttaccagcacggttcaggtgtttactgactcggagtaccagctcccgtacgtcctcggctcggcgcatcaaggatgcctcccgccgttcccagcagacgtcttcatggtgccacagtatggatacctcaccctgaacaacgggagtcaggcggtaggacgctcttcattttactgcctggagtactttccttctcagatgctgcgtaccggaaacaactttaccttcagctacacctttgaggacgttccttttcacagcagctacgctcacagccagagtttggaccgtctcatgaatcctctcatcgaccagtacctgtattacttgagcagaacaaacactccaagcggaaccactacgcagtccaggcttcagttttctcaagccggagcgagtgacattcgggaccagtctaggaactggcttcctggaccctgttaccgccagcagcgagtatcaaagacagctgcggacaacaacaacagtgattactcgtggactggagctaccaagtatcacctcaatggaagagactctctggtgaatccgggcacagccatggccagccacaaggacgatgaagaaaagtattttcctcagagcggggttctcatcttcggaaaacaagactcgggaaaaactaatgtggacattgaaaaggtcatgattacagacgaagaggaaatcaggaccaccaatcccgtggctacggagcagtatggttctgtatctaccaatctccagagcggcaacacacaagcagctacctcagatgtcaacacacaaggcgttcttccaggcatggtctggcaggacagagacgtgtacctgcagggacccatctgggcaaagattccacacacggacggacattttcacccttctcctcttatgggaggatttggaccgaagcaccctcccccgcagattctcatcaagaataccccggtacctgcgaatccttctaccaccttcagcgcggcaaagtttgcttccttcatcacacagtactccacggggcaggtcagcgtggagatcgagtgggagctgcagaaagagaacagcaaacgctggaaccccgagatccagtatacctccaactacaacaagtctgttaatgtggactttactgtggacactaatggcgtgtattcagagcctcgccccattggcacaagatacctgactcgtaatctgtaa

SEQ ID NO: 3409 - DNA, 2208 bp, Artificial Sequence
  source: /note="Description of Artificial Sequence: Synthetic polynucleotide"
atggctgccgatggttatcttccagattggctcgaggacactctctctgaaggaataagacagtggtggaagctcaaacctggcccaccaccgccaaagcccgcagagcggcataaggacgacagcaggggtcttgtgcttcctgggtacaagtacctcggacccttcaacggactcgacaaaggagagccggtcaacgaggcagacgccgcggccctcgagcacgacaaggcctacgaccggcagctcgacagcggagacaacccgtacctcaagtacaaccacgccgacgcggagtttcaggagcgccttaaagaagatacgtcttttgggggcaacctcgcaagagcagtattccaggcgaaaaagggggttcttgaacctctgggcctggttgaggagcctgttaagacggctccgggaaaaaagaggccggtagagcactctcctgcggagctagattcctcctccggaactggaaagtcgggccaacagcctgcaagaaagagattgaattttggtcagactggagacgcagactccgtacctgacccccagcctctcggacagccaccagcagccccctctggtctgggaactaatacgatggcttcaggcagtggcgcaccaatggcagacaataacgagggcgccgacggagtgggtaattcctcgggaaattggcattgcgattccacatggatgggcgacagagtcatcaccaccagcacccgcacctgggctctgcccacctacaacaaccatctgtacaagcaaatttccagccagtctggggccagcaacgacaaccactactttggctacagcaccccttgggggtattttgacttcaacagattccactgccacttctccccacgtgactggcaaagactcatcaacaacaattggggattccggcccaaaagactcaacttcaagctctttaacattcaagtcaaggaggtcacgcagaatgacggtacgacgacgattgccaataaccttaccagcacggttcaggtgtttactgactcggagtaccagctcccgtacgtcctcggctcggcgcatcaaggatgcctcccgccgttcccagcagacgtcttcatggtgccacagtatggatacctcaccctgaacaacgggagtcaggcggtaggacgctcttcattttactgcctggagtactttccttctcagatgctgcgtaccggaaacaactttaccttcagctacacctttgaggacgttccttttcacagcagctacgctcacagccagagtttggaccgtctcatgaatcctctcatcgaccagtacctgtattacttgagcagaacaaacactccaagcggaaccactacgcagtccaggcttcagttttctcaagccggagcgagtgacattcgggaccagtctaggaactggcttcctggaccctgttaccgccagcagcgagtatcaaagacagctgcggacaacaacaacagtgattactcgtggactggagctaccaagtatcacctcaatggaagagactctctggtgaatccgggcacagccatggccagccacaaggacgatgaagaaaagtattttcctcagagcggggttctcatcttcggaaaacaagactcgggaaaaactaatgtggacattgaaaaggtcatgattacagacgaagaggaaatcaggaccaccaatcccgtggctacggagcagtatggttctgtatctaccaatctccagagcggcaacacacaagcagctacctcagatgtcaacacacaaggcgttcttccaggcatggtctggcaggacagagacgtgtacctgcagggacccatctgggcaaagattccacacacggacggacattttcacccttctcctcttatgggaggatttggaccgaagcaccctcccccgcagattctcatcaagaataccccggtacctgcgaatccttctaccaccttcagcgcggcaaagtttgcttccttcatcacacagtactccacggggcaggtcagcgtggagatcgagtgggagctgcagaaagagaacagcaaacgctggaaccccgagatccagtatacctccaactacaacaagtctgttaatgtggactttactgtggacactaatggcgtgtattcagagcctcgccccattggcacaagatacctgactcgtaatctgtaa

SEQ ID NO: 3410 - DNA, 2208 bp, Artificial Sequence
  source: /note="Description of Artificial Sequence: Synthetic polynucleotide"
atggctgccgatggttatcttccagattggctcgaggacactctctctgaaggaataagacagtggtggaagctcaaacctggcccaccaccgccaaagcccgcagagcggcataaggacgacagcaggggtcttgtgcttcctgggtacaagtacctcggacccttcaacggactcgacaaaggagagccggtcaacgaggcagacgccgcggccctcgagcacgacaaggcctacgaccggcagctcgacagcggagacaacccgtacctcaagtacaaccacgccgacgcggagtttcaggagcgccttaaagaagatacgtcttttgggggcaacctcgcaagagcagtattccaggcgaaaaagagggttcttgaacctctgggcctggttgaggagcctgttaagacggctccgggaaaaaagaggccggtagagcactctcctgcggagctagattcctcctccggaactggaaagtcgggccaacagcctgcaagaaagagattgaattttggtcagactggagacgcagactccgtacctgacccccagcctctcggacagccaccagcagccccctctggtctgggaactaatacgatggcttcaggcagtggcgcaccaatggcagacaataacgagggcgccgacggagtgggtaattcctcgggaaattggcattgcgattccacatggatgggcgacagagtcatcaccaccagcacccgcacctgggctctgcccacctacaacaaccatctgtacaagcaaatttccagccagtctggggccagcaacgacaaccactactttggctacagcaccccttgggggtattttgacttcaacagattccactgccacttctccccacgtgactggcaaagactcatcaacaacaattggggattccggcccaaaagactcaacttcaagctctttaacattcaagtcaaggaggtcacgcagaatgacggtacgacgacgattgccaataaccttaccagcacggttcaggtgtttactgactcggagtaccagctcccgtacgtcctcggctcggcgcatcaaggatgcctcccgccgttcccagcagacgtcttcatggtgccacagtatggatacctcaccctgaacaacgggagtcaggcggtaggacgctcttcattttactgcctggagtactttccttctcagatgctgcgtaccggaaacaactttaccttcagctacacctttgaggacgttccttttcacagcagctacgctcacagccagagtttggaccgtctcatgaatcctctcatcgaccagtacctgtattacttgagcagaacaaacactccaagcggaaccactacgcagtccaggcttcagttttctcaagccggagcgagtgacattcgggaccagtctaggaactggcttcctggaccctgttaccgccagcagcgagtatcaaagacagctgcggacaacaacaacagtgattactcgtggactggagctaccaagtatcacctcaatggaagagactctctggtgaatccgggcacagccatggccagccacaaggacgatgaagaaaagtattttcctcagagcggggttctcatcttcggaaaacaagactcgggaaaaactaatgtggacattgaaaaggtcatgattacagacgaagaggaaatcaggaccaccaatcccgtggctacggagcagtatggttctgtatctaccaatctccagagcggcaacacacaagcagctacctcagatgtcaacacacaaggcgttcttccaggcatggtctggcaggacagagacgtgtacctgcagggacccatctgggcaaggattccacacacggacggacattttcacccttctcctcttatgggaggatttggaccgaagcaccctcccccgcagattctcatcaagaataccccggtacctgcgaatccttctaccaccttcagcgcggcaaagtttgcttccttcatcacacagtactccacggggcaggtcagcgtggagatcgagtgggagctgcagaaagagaacagcaaacgctggaaccccgagatccagtatacctccaactacaacaagtctgttaatgtggactttactgtggacactaatggcgtgtattcagagcctcgccccattggcacaagatacctgactcgtaatctgtaa

SEQ ID NO: 3411 - DNA, 2208 bp, Artificial Sequence
  source: /note="Description of Artificial Sequence: Synthetic polynucleotide"
atggctgccgatggttatcttccagattggctcgaggacactctctctgaaggaataagacagtggtggaagctcaaacctggcccaccaccgccaaagcccgcagagcggcataaggacgacagcaggggtcttgtgcttcctgggtacaagtacctcggacccttcaacggactcgacaaaggagagccggtcaacgaggcagacgccgcggccctcgagcacgacaaggcctacgaccggcagctcgacagcggagacaacccgtacctcaagtacaaccacgccgacgcggagtttcaggagcgccttaaagaagatacgtcttttgggggcaacctcgcaagagcagtattccaggcgaaaaagagggttcttgaacctctgggcctggttgaggagcctgttaagacggctccgggaaaaaagaggccggtagggcactctcctgcggagctagattcctcctccggaactggaaagtcgggccaacagcctgcaagaaagagattgaattttggtcagactggagacgcagactccgtacctgacccccagcctctcggacagccaccagcagccccctctggtctgggaactaatacgatggcttcaggcagtggcgcaccaatggcagacaataacgagggcgccgacggagtgggtaattcctcgggaaattggcattgcgattccacatggatgggcgacagagtcatcaccaccagcacccgcacctgggctctgcccacctacaacaaccatctgtacaagcaaatttccagccagtctggggccagcaacgacaaccactactttggctacagcaccccttgggggtattttgacttcaacagattccactgccacttctccccacgtgactggcaaagactcatcaacaacaattggggattccggcccaaaagactcaacttcaagctctttaacattcaagtcaaggaggtcacgcagaatgacggtacgacgacgattgccaataaccttaccagcacggttcaggtgtttactgactcggagtaccagctcccgtacgtcctcggctcggcgcatcaaggatgcctcccgccgttcccagcagacgtcttcatggtgccacagtatggatacctcaccctgaacaacgggagtcaggcggtaggacgctcttcattttactgcctggagtactttccttctcagatgctgcgtaccggaaacaactttaccttcagctacacctttgaggacgttccttttcacagcagctacgctcacagccagagtttggaccgtctcatgaatcctctcatcgaccagtacctgtattacttgagcagaacaaacactccaagcggaaccactacgcagtccaggcttcagttttctcaagccggagcgagtgacattcgggaccagtctaggaactggcttcctggaccctgttaccgccagcagcgagtatcaaagacagctgcggacaacaacaacagtgattactcgtggactggagctaccaagtatcacctcaatggaagagactctctggtgaatccgggcacagccatggccagccacaaggacgatgaagaaaagtattttcctcagagcggggttctcatcttcggaaaacaagactcgggaaaaactaatgtggacattgaaaaggtcatgattacagacgaagaggaaatcaggaccaccaatcccgtggctacggagcagtatggttctgtatctaccaatctccagagcggcaacacacaagcagctacctcagatgtcaacacacaaggcgttcttccaggcatggtctggcaggacagagacgtgtacctgcagggacccatctgggcaaagattccacacacggacggacattttcacccttctcctcttatgggaggatttggaccgaagcaccctcccccgcagattctcatcaagaataccccggtacctgcgaatccttctaccaccttcagcgcggcaaagtttgcttccttcatcacacagtactccacggggcaggtcagcgtggagatcgagtgggagctgcagaaagagaacagcaaacgctggaaccccgagatccagtatacctccaactacaacaagtctgttaatgtggactttactgtggacactaatggcgtgtattcagagcctcgccccattggcacaagatacctgactcgtaatctgtaa

SEQ ID NO: 3412 - DNA, 2208 bp, Artificial Sequence
  source: /note="Description of Artificial Sequence: Synthetic polynucleotide"
atggctgccgatggttatcttccagattggctcgaggacactctctctgaaggaataagacagtggtggaagctcaaacctggcccaccaccgccaaagcccgcagagcggcataaggacgacagcaggggtcttgtgcttcctgggtacaagtacctcggacccttcaacggactcgacaaaggagagccggtcaacgaggcagacgccgcggccctcgagcacgacaaggcctacgaccggcagctcgacagcggagacaacccgtacctcaagtacaaccacgccgacgcggagtttcaggagcgccttaaagaagatacgtcttttgggggcaacctcgcaagagcagtattccaggcgaaaaagagggttcttgaacctctgggcctggttgaggagcctgttaagacggctccgggaaaaaagaggccggtagagcactctcctgcggagctagattcctcctccggaactggaaagtcgggccaacagcctgcaagaaagagattgaattttggtcagactggagacgcagactccgtacctgacccccagcctctcggacagccaccagcagccccctctggtctgggaactaatacgatggcttcaggcagtggcgcaccaatggcagacaataacgagggcgccgacggagtgggtaattcctcgggaaattggcattgcgattccacatggatgggcgacagagtcatcaccaccagcacccgcacctgggctctgcccacctacaacaaccatctgtacaagcaaatttccagccagtctggggccagcaacgacaaccactactttggctacagcaccccttgggggtattttgacttcaacagattccactgccacttctccccacgtgactggcaaagactcatcaacaacaattggggattccggcccaaaagactcaacttcaagctctttaacattcaagtcaaggaggtcacgcagaatgacggtacgacgacgattgccaataaccttaccagcacggttcaggtgtttactgactcggagtaccagctcccgtacgtcctcggctcggcgcatcaaggatgcctcccgccgttcccagcagacgtcttcatggtgccacagtatggatacctcaccctgaacaacgggagtcaggcggtaggacgctcttcattttactgcctggagtactttccttctcagatgctgcgtaccggaaacaactttaccttcagctacacctttgaggacgttccttttcacagcagctacgctcacagccagagtttggaccgtctcatgaatcctctcatcgaccagtacctgtattacttgagcagaacaaacactccaagcggaaccactacgcagtccaggcttcagttttctcaagccggagcgagtgacattcgggaccagtctaggaactggcttcctggaccctgttaccgccagcagcgagtatcaaagacagctgcggacaacaacaacagtgattactcgtggactggagctaccaagtatcacctcaatggaagagactctctggtgaatccgggcacagccatggccagccacaaggacgatgaagaaaagtattttcctcagagcggggttctcatcttcggaaaacaagactcgggaaaaactaatgtggacattgaaaaggtcatgattacagacgaagaggaaatcaggaccaccaatcccgtggctacggagcagtatggttctgtatctaccaatctccagagcggcaacacacaagcagctacctcagatgtcaacacacaaggcgttcttccaggcatggtctggcaggacagagacgtgtacctgcagggacccatctgggcaaagattccacacacggacggacattttcacccttctcctcttatgggaggatttggaccgaagcaccctcccccgcagattctcatcaagaataccccggtacctgcgaatccttctaccaccttcagcgcggcaaagtttgcttccttcatcacacagtactccacggggcaggtcagcgtggagatcgagtgggagctgcagaaagggaacagcaaacgctggaaccccgagatccagtatacctccaactacaacaagtctgttaatgtggactttactgtggacactaatggcgtgtattcagagcctcgccccattggcacaagatacctgactcgtaatctgtaa

SEQ ID NO: 3413 - DNA, 2208 bp, Artificial Sequence
  source: /note="Description of Artificial Sequence: Synthetic polynucleotide"
atggctgccgatggttatcttccagattggctcgaggacactctctctgaaggaataagacagtggtggaagctcaaacctggcccaccaccgccaaagcccgcagagcggcataaggacgacagcaggggtcttgtgcttcctgggtacaagtacctcggacccttcaacggactcgacaaaggagagccggtcaacgaggcagacgccgcggccctcgagcacgacaaggcctacgaccggcagctcgacagcggagacaacccgtacctcaagtacaaccacgccgacgcggagtttcaggagcgccttaaagaagatacgccttttgggggcaacctcgcaagagcagtattccaggcgaaaaagagggttcttgaacctctgggcctggttgaggagcctgttaagacggctccgggaaaaaaggggccggtagagcactctcctgcggagctagattcctcctccggaactggaaagtcgggccaacagcctgcaagaaagagattgaattttggtcagactggagacgcagactccgtacctgacccccagcctctcggacagccaccagcagccccctctggtctgggaactaatacgatggcttcaggcagtggcgcaccaatggcagacaataacgagggcgccgacggagtgggtaattcctcgggaaattggcattgcgattccacatggatgggcgacagagtcatcaccaccagcacccgcacctgggctctgcccacctacaacaaccatctgtacaagcaaatttccagccagtctggggccagcaacgacaaccactactttggctacagcaccccttgggggtattttgacttcaacagattccactgccacttctccccacgtgactggcaaagactcatcaacaacaattggggattccggcccaaaagactcaacttcaagctctttaacattcaagtcaaggaggtcacgcagaatgacggtacgacgacgattgccaataaccttaccagcacggttcaggtgtttactgactcggagtaccagctcccgtacgtcctcggctcggcgcatcaaggatgcctcccgccgttcccagcagacgtcttcatggtgccacagtatggatacctcaccctgaacaacgggagtcaggcggtaggacgctcttcattttactgcctggagtactttccttctcagatgctgcgtaccggaaacaactttaccttcagctacacctttgaggacgttccttttcacagcagctacgctcacagccagagtttggaccgtctcatgaatcctctcatcgaccagtacctgtattacttgagcagaacaaacactccaagcggaaccactacgcagtccaggcttcagttttctcaagccggagcgagtgacattcgggaccagtctaggagctggcttcctggaccctgttaccgccagcagcgagtatcaaagacagctgcggacaacaacaacagtgattactcgtggactggagctaccaagtatcacctcaatggaagagactctctggtgaatccgggcacagccatggccagccacaaggacgatgaagaaaagtattttcctcagagcggggttctcatcttcggaaaacaagactcgggaaaaactaatgtggacattgaaaaggtcatgattacagacgaagaggaaatcaggaccaccaatcccgtggctacggagcagtatggttctgtatctaccaatctccagagcggcaacacacaagcagctacctcagatgtcaacacacaaggcgttcttccaggcatggtctggcaggacagagacgtgtacctgcagggacccatctgggcaaagattccacacacggacggacattttcacccttctcctcttatgggaggatttggaccgaagcaccctcccccgcagattctcatcaagaataccccggtacctgcgaatccttctaccaccttcagcgcggcaaagtttgcttccttcatcacacagtactccacggggcaggtcagcgtggagatcgagtgggagctgcagaaagagaacagcaaacgctggaaccccgagatccagtatacctccaactacaacaagtctgttaatgtggactttactatggacactaatggcgtgtattcagagcctcgccccattggcacaagatacctgactcgtaatctgtaa

SEQ ID NO: 3414 - DNA, 2208 bp, Artificial Sequence
  source: /note="Description of Artificial Sequence: Synthetic polynucleotide"
atggctgccgatggttatcttccagattggctcgaggacactctctctgaaggaataagacagtggtggaagctcaaacctggcccaccaccgccaaagcccgcagagcggcataaggacgacagcaggggtcttgtgcttcctgggtacaagtacctcggacccttcaacggactcgacaaaggagagccggtcaacgaggcagacgccgcggccctcgagcacgacaaggcctacgaccggcagctcgacagcggagacaacccgtacctcaagtacaaccacgccgacgcggagtttcaggagcgccttaaagaagatacgtcttttgggggcaacctcgcaagagcagtattccaggcgaaaaagagggttcttgaacctctgggcctggttgaggagcctgttaagacggctccgggaaaaaagaggccggtagagcactctcctgcggagctagattcctcctccggaactggaaagtcgggccaacagcctgcaagaaagagattgaattttggtcagactggagacgcagactccgtacctgacccccagcctctcggacagccaccagcagccccctctggtctgggaactaatacgatggcttcaggcagtggcgcaccaatggcagacaataacgagggcgccgacggagtgggtaattcctcgggaaattggcattgcgattccacatggatgggcgacagagtcatcaccaccagcacccgcacctgggctctgcccacctacaacaaccatctgtacaagcaaatttccagccagtctggggccagcaacgacaaccactactttggctacagcaccccttgggggtattttgacttcaacagattccactgccacttctccccacgtgactggcaaagactcatcaacaacaattggggattccggcccaaaagactcaacttcaagctctttaacattcaagtcaaggaggtcacgcagaatgacggtacgacgacgattgccaataaccttaccagcacggttcaggtgtttactgactcggagtaccagctcccgtacgtcctcggctcggcgcatcaaggatgcctcccgccgttcccagcagacgtcttcatggtgccacagtatggatacctcaccctgaacaacgggagtcaggcggtaggacgctcttcattttactgcctggagtactttccttctcagatgctgcgtaccggaaacaactttaccttcagctacacctttgaggacgttccttttcacagcagctacgctcacagccagagtttggaccgtctcatgaatcctctcatcgaccagtacctgtattacttgagcagaacaaacactccaagcggaaccactacgcagtccaggcttcagttttctcaagccggagcgagtgacattcgggaccagtctaggaactggcttcctggaccctgttaccgccagcagcgagtatcaaagacagctgcggacaacaacaacagtgattactcgtggactggagctaccaagtatcacctcaatggaagggactctctggtgaatccgggcacagccatggccagccacaaggacgatgaagaaaagtattttcctcagagcggggttctcatcttcggaaaacaagactcgggaaaaactaatgcggacattgaaaaggtcatgattacagacgaagaggaaatcaggaccaccaatcccgtggctacggagcagtatggttctgtatctaccaatctccagagcggcaacacacaagcagctacctcagatgtcaacacacaaggcgttcttccaggcatggtctggcaggacagagacgtgtacctgcagggacccatctgggcaaagattccacacacggacggacattttcacccttctcctcttatgggaggatttggaccgaagcaccctcccccgcagattctcatcaagaataccccggtacctgcgaatccttctaccaccttcagcgcggcaaagtttgcttccttcatcacacagtactccacggggcaggtcagcgtggagatcgagtgggagctgcagaaagagaacagcaaacgctggaaccccgagatccagtatacctccaactacaacaagtctgttaatgtggactttactgtggacactaatggcgtgtattcagagcctcgccccattggcacaagatacctgactcgtaatctgtaa

SEQ ID NO: 3415 - DNA, 2208 bp, Artificial Sequence
  source: /note="Description of Artificial Sequence: Synthetic polynucleotide"
atggctgccgatggttatcttccagattggctcgaggacactctctctgaaggaataagacagtggtggaagctcaaacctggcccaccaccgccaaagcccgcagagcggcataaggacgacagcaggggtcttgtgcttcctgggtacaagtacctcggacccttcaacggactcgacaaaggagagccggtcaacgaggcagacgccgcggccctcgagcacgacaaggcctacgaccggcagctcgacagcggagacaacccgtacctcaagtacaaccacgccgacgcggagtttcaggagcgccttaaagaagatacgtcttttgggggcaacctcgcaagagcagtattccaggcgaaaaagagggttcttgaacctctgggcctggttgaggagcctgttaagacggctccgggaaaaaagaggccggtagagcactctcctgcggagctagattcctcctccggaactggaaagtcgggccaacagcctgcaagaaagagattgaattttggtcagactggagacgcagactccgtacctgacccccagcctctcggacagccaccagcagccccctctggtctgggaactaatacgatggcttcaggcagtggcgcaccaatggcagacaataacgagggcggcgacggagtgggtaattcctcgggaaattggcattgcgattccacatggatgggcgacagagtcatcaccaccagcacccgcacctgggctctgcccacctacaacaaccatctgtacaagcaaatttccagccagtctggggccagcaacgacaaccactactttggctacagcaccccttgggggtattttgacttcaacagattccactgccacttctccccacgtgactggcaaagactcatcaacaacaattggggattccggcccaaaagactcaacttcaagctctttaacattcaagtcaaggaggtcacgcagaatgacggtacgacgacgattgccaataaccttaccagcacggttcaggtgtttactgactcggagtaccagctcccgtacgtcctcggctcggcgcatcaaggatgcctcccgccgttcccagcagacgtcttcatggtgccacagtatggatacctcaccctgaacaacgggagtcaggcggtaggacgctcttcattttactgcctggagtactttccttctcagatgctgcgtaccggaaacaactttaccttcagctacacctttgaggacgttccttttcacagcagctacgctcacagccagagtttggaccgtctcatgaatcctctcatcgaccagtacctgtattacttgagcagaacaaacactccaagcggaaccactacgcagtccaggcttcagttttctcaagccggagcgagtgacattcgggaccagtctaggaactggcttcctggaccctgttaccgccagcagcgagtatcaaagacagctgcggacaacaacaacagtgattactcgtggactggagctaccaagtatcacctcaatggaagggactctctggtgaatccgggcacagccatggccagccacaaggacgatgaagaaaagtattttcctcagagcggggttctcatcttcggaaaacaagactcgggaaaaactaatgtggacattgaaaaggtcatgattacagacgaagaggaaatcaggaccaccaatcccgtggctacggagcagtatggttctgtatctaccaatctccagagcggcaacacacaagcagctacctcagatgtcaacacacaaggcgttcttccaggcatggtctggcaggacagagacgtgtacctgcagggacccatctgggcaaagattccacacacggacggacattttcacccttctcctcttatgggaggatttggaccgaagcaccctcccccgcagattctcatcaagaataccccggtacctgcgaatccttctaccaccttcagcgcggcaaagtttgcttccttcatcacacagtactccacggggcaggtcagcgtggagatcgagtgggagctgcagaaagagaacagcaaacgctggaaccccgagatccagtatacctccaactacaacaagtctgttaatgtggactttactgtggacactaatggcgtgtattcagagcctcgccccattggcacaagatacctgactcgtaatctgtaa

SEQ ID NO: 3416 - DNA, 2208 bp, Artificial Sequence
  source: /note="Description of Artificial Sequence: Synthetic polynucleotide"
atggctgccgatggttatcttccagattggctcgaggacactctctctgaaggaataagacagtggtggaagctcaaacctggcccaccaccgccaaagcccgcagagcggcataaggacgacagcaggggtcttgtgcttcctgggtacaagtacctcggacccttcaacggactcgacaaaggagagccggtcaacgaggcagacgccgcggccctcgagcacgacaaggcctacgaccggcagctcgacagcggagacaacccgtacctcaagtacaaccacgccgacgcggagtttcaggagcgccttaaagaagatacgtcttttgggggcaacctcgcaagagcagtattccaggcgaaaaagagggttcttgaacctctgggcctggttgaggagcctgttaagacggctccgggaaaaaagaggccggtagagcactctcctgcggagctagattcctcctccggaactggaaagtcgggccaacagcctgcaagaaagagattgaattttggtcagactggagacgcagactccgtacctgacccccagcctctcggacagccaccagcagccccctctggtctgggaactaatacgatggcttcaggcagtggcgcaccaatggcagacaataacgagggcgccgacggagtgggtaattcctcgggaaattggcattgcgattccacatggatgggcgacagagtcatcaccaccagcacccgcacctgggctctgcccacctacaacaaccatctgtacaagcaaatttccagccagtctggggccagcaacgacaaccactactttggctacagcaccccttgggggtattttgacttcaacagattccactgccacttccccccacgtgactggcaaagactcatcaacaacaattggggattccggcccaaaagactcaacttcaagctctttaacattcaagtcaaggaggtcacgcagaatgacggtacgacgacgattgccaataaccttaccagcacggttcaggtgtttactgactcggagtaccagctcccgtacgtcctcggctcggcgcatcaaggatgcctcccgccgttcccagcagacgtcttcatggtgccacagtatggatacctcaccctgaacaacgggagtcaggcggtaggacgctcttcattttactgcctggagtactttccttctcagatgctgcgtaccggaaacaactttaccttcagctacacctttgaggacgttccttttcacagcagctacgctcacagccagagtttggaccgtctcatgaatcctctcatcgaccagtacctgtattacttgagcagaacaaacactccaagcggaaccactacgcagtccaggcttcagttttctcaagccggagcgagtgacattcgggaccagtctaggaactggcttcctggaccctgttaccgccagcagcgagtatcaaagacagctgcggacaacaacaacagtgattactcgtggactggagctaccaagtatcacctcaatggaagagactctctggtgaatccgggcacagccatggccagccacaaggacgatgaagaaaagtattttcctcagagcggggttctcatcttcggaaaacaagactcgggaaaaactaatgtggacattgaaaaggtcatgattacagacgaagaggaaatcaggaccaccaatcccgtggctacggagcagtatggttctgtatctaccaatctccagagcggcaacacacaagcagctacctcagatgtcaacacacaaggcgttcttccaggcatggtctggcaggacagagacgtgtacctgcagggacccatctgggcaaagattccacacacggacggacattttcacccttctcctcttatgggaggatttggaccgaagcaccctcccccgcagattctcatcaagaataccccggtacctgcgaatccttctaccaccttcagcgcggcaaagtttgcttccttcatcacacagtactccacggggcaggtcagcgtggagatcgagtgggagctgcagaaagagaacagcaaacgctggaaccccgagatccagtatacctccaactacaacaagtctgttaatgtggactttactgtggacactaatggcgtgtattcagagcctcgccccattggcacaagatacctgactcgtaatctgtaa

SEQ ID NO: 3417 - DNA, 2208 bp, Artificial Sequence
  source: /note="Description of Artificial Sequence: Synthetic polynucleotide"
atggctgccgatggttatcttccagattggctcgaggacactctctctgaaggaataagacagtggtggaagctcaaacctggcccaccaccgccaaagcccgcagagcggcataaggacgacagcaggggtcttgtgcttcctgggtacaagtacctcggacccttcaacggactcgacaaaggagagccggtcaacgaggcagacgccgcggccctcgagcacgacaaggcctacgaccggcagctcgacagcggagacaacccgtacctcaagtacaaccacgccgacgcggagtttcaggagcgccttaaagaagatacgtcttttgggggcaacctcgcaagagcagtattccaggcgaaaaagagggttcttgaacctctgggcctggttgaggagcctgttaagacggctccgggaaaaaagaggccggtagagcactctcctgcggagctagattcctcctccggagctggaaagtcgggccaacagcctgcaagaaagagattgaattttggtcagactggagacgcagactccgtacctgacccccagcctctcggacagccaccagcagccccctctggtctgggaactaatacgatggcttcaggcagtggcgcaccaatggcagacaataacgagggcgccgacggagtgggtaattcctcgggaaattggcattgcgattccacatggatgggcgacagagtcatcaccaccagcacccgcacctgggctctgcccacctacaacaaccatctgtacaagcaaatttccagccagtctggggccagcaacgacaaccactaccttggctacagcaccccttgggggtattttgacttcaacagattccactgccacttctccccacgtgactggcaaagactcatcaacaacaattggggattccggcccaaaagactcaacttcaagctctttaacattcaagtcaaggaggtcacgcagaatgacggtacgacgacgattgccaataaccttaccagcacggttcaggtgtttactgactcggagtaccagctcccgtacgtcctcggctcggcgcatcaaggatgcctcccgccgttcccagcagacgtcttcatggtgccacagtatggatacctcaccctgaacaacgggagtcaggcggtaggacgctcttcattttactgcctggagtactttccttctcagatgctgcgtaccggaaacaactttaccttcagctacacctttgaggacgttccttttcacagcagctacgctcacagccagagtttggaccgtctcatgaatcctctcatcgaccagtacctgtattacttgagcagaacaaacactccaagcggaaccactacgcagtccaggcttcagttttctcaagccggagcgagtgacattcgggaccagtctaggaactggcttcctggaccctgttaccgccagcagcgagtatcaaagacagctgcggacaacaacaacagtgattactcgtggactggagctaccaagtatcacctcaatggaagagactctctggtgaatccgggcacagccatggccagccacaaggacgatgaagaaaagtattttcctcagagcggggttctcatcttcggaaaacaagactcgggaaaaactaatgtggacattgaaaaggtcatgattacagacgaagaggaaatcaggaccaccaatcccgtggctacggagcagtatggttctgtatctaccaatctccagagcggcaacacacaagcagctacctcagatgtcaacacacaaggcgttcttccaggcatggtctggcaggacagagacgtgtacctgcagggacccatctgggcaaagattccacacacggacggacattttcacccttctcctcttatgggaggatttggaccgaagcaccctcccccgcagattctcatcaagaataccccggtacctgcgaatccttctaccaccttcagcgcggcaaagtttgcttccttcatcacacagtactccacggggcaggtcagcgtggagatcgagtgggagctgcagaaagagaacagcaaacgctggaaccccgagatccagtatacctccaactacaacaagtctgttaatgtggactttactgtggacactaatggcgtgtattcagagcctcgccccattggcacaagatacctgactcgtaatctgtaa

SEQ ID NO: 3418 - DNA, 2208 bp, Artificial Sequence
  source: /note="Description of Artificial Sequence: Synthetic polynucleotide"
atggctgccgatggttatcttccagattggctcgaggacactctctctgaaggaataagacagtggtggaagctcaaacctggcccaccaccgccaaagcccgcagagcggcataaggacgacagcaggggtcttgtgcttcctgggtacaagtacctcggacccttcaacggactcgacaaaggagagccggtcaacgaggcagacgccgcggccctcgagcacgacaaggcctacgaccggcagctcgacagcggagacaacccgtacctcaagtacaaccacgccgacgcggagtttcaggagcgccttaaagaagatacgccttttgggggcaacctcgcaagagcagtattccaggcgaaaaagagggttcttgaacctctgggcctggttgaggagcctgttaagacggctccgggaaaaaagaggccggtagagcactctcctgcggagctagattcctcctccggaactggaaagtcgggccaacagcctgcaagaaagagattgaattttggtcagactggagacgcagactccgtacctgacccccagcctctcggacagccaccagcagccccctctggtctgggaactaatacgatggtttcaggcagtggcgcaccaatggcagacaataacgagggcgccgacggagtgggtaattcctcgggaaattggcattgcgattccacatggatgggcgacagagtcatcaccaccagcacccgcacctgggctctgcccacctacaacaaccatctgtacaagcaaatttccagccagtctggggccagcaacgacaaccactactttggctacagcaccccttgggggtattttgacttcaacagattccactgccacttctccccacgtgactggcaaagactcatcaacaacaattggggattccggcccaaaagactcaacttcaagctctttaacattcaagtcaaggaggtcacgcagaatgacggtacgacgacgattgccaataaccttaccagcacggttcaggtgtttactgactcggagtaccagctcccgtacgtcctcggctcggcgcatcaaggatgcctcccgccgttcccagcagacgtcttcatggtgccacagtatggatacctcaccctgaacaacgggagtcaggcggtaggacgctcttcattttactgcctggagtactttccttctcagatgctgcgtaccggaaacaactttaccttcagctacacctttgaggacgttccttttcacagcagctacgctcacagccagagtttggaccgtctcatgaatcctctcatcgaccagtacctgtattacttgagcagaacaaacactccaagcggaaccactacgcagtccaggcttcagttttctcaagccggagcgagtgacattcgggaccagtctaggaactggcttcctggaccctgttaccgccagcagcgagtatcaaagacagctgcggacaacaacaacagtgattactcgtggactggagctaccaagtatcacctcaatggaagagactctctggtgaatccgggcacagccatggccagccacaaggacgatgaagaaaagtattttcctcagagcggggttctcatcttcggaaaacaagactcgggaaaaactaatgtggacattgaaaaggtcatgattacagacgaagaggaaatcaggaccaccaatcccgtggctacggagcagtatggttctgtatctaccaatctccagagcggcaacacacaagcagctacctcagatgtcaacacacaaggcgttcttccaggcatggtctggcaggacagagacgtgtacctgcagggacccatctgggcaaagattccacacacggacggacattttcacccttctcctcttatgggaggatttggaccgaagcaccctcccccgcagattctcatcaagaataccccggtacctgcgaatccttctaccaccttcagcgcggcaaagtttgcttccttcatcacacaatactccacggggcaggtcagcgtggagatcgagtgggagctgcagaaagagaacagcaaacgctggaaccccgagatccagtatacctccaactacaacaagtctgttaatgtggactttactgtggacactaatggcgtgtattcagagcctcgccccattggcacaagatacctgactcgtaatctgtaa

SEQ ID NO: 3419 - DNA, 2208 bp, Artificial Sequence
  source: /note="Description of Artificial Sequence: Synthetic polynucleotide"
atggctgccgatggttatcttccagattggctcgaggacactctctctgaaggaataagacagtggtgggagctcaaacctggcccaccaccgccaaagcccgcagagcggcataaggacgacagcaggggtcttgtgcttcctgggtacaagtacctcggacccttcaacggactcgacaaaggagagccggtcaacgaggcagacgccgcggccctcgagcacgacaaggcctacgaccggcagctcgacagcggagacaacccgtacctcaagtacaaccacgccgacgcggagtttcaggagcgccttaaagaagatacgtcttttgggggcaacctcgcaagagcagtattccaggcgaaaaagagggttcttgaacctctgggcctggttgaggagcctgttaagacggctccgggaaaaaagaggccggtagagcactctcctgcggagctagattcctcctccggaactggaaagtcgggccaacagcctgcaagaaagagattgaattttggtcagactggagacgcagactccgtacctgacccccagcctctcgggcagccaccagcagccccctctggtctgggaactaatacgatggcttcaggcagtggcgcaccaatggcagacaataacgagggcgccgacggagtgggtaattcctcgggaaattggcattgcgattccacatggatgggcgacagagtcatcaccaccagcacccgcacctgggctctgcccacctacaacaaccatctgtacaagcaaatttccagccagtctggggccagcaacgacaaccactactttggctacagcaccccttgggggtattttgacttcaacagattccactgccacttctccccacgtgactggcaaagactcatcaacaacaattggggattccggcccaaaagactcaacttcaagctctttaacattcaagtcaaggaggtcacgcagaatgacggtacgacgacgattgccaataaccttaccagcacggttcaggtgtttactgactcggagtaccagctcccgtacgtcctcggctcggcgcatcaaggatgcctcccgccgttcccagcagacgtcttcatggtgccacagtatggatacctcaccctgaacaacgggagtcaggcggtaggacgctcttcattttactgcctggagtactttccttctcagatgctgcgtaccggaaacaactttaccttcagctacacctttgaggacgttccttttcacagcagctacgctcacagccagagtttggaccgtctcatgaatcctctcatcgaccagtacctgtattacttgagcagaacaaacactccaagcggaaccactacgcagtccaggcttcagttttctcaagccggagcgagtgacattcgggaccagtctaggaactggcttcctggaccctgttaccgccagcagcgagtatcaaagacagctgcggacaacaacaacagtgattactcgtggactggagctaccaagtatcacctcaatggaagagactctctggtgaatccgggcacagccatggccagccacaaggacgatgaagaaaagtattttcctcagagcggggttctcatcttcggaaaacaagactcgggaaaaactaatgtggacattgaaaaggtcatgattacagacgaagaggaaatcaggaccaccaatcccgtggctacggagcagtatggttctgtatctaccaatctccagagcggcaacacacaagcagctacctcagatgtcaacacacaaggcgttcttccaggcatggtctggcaggacagagacgtgtacctgcagggacccatctgggcaaagattccacacacggacggacattttcacccttctcctcttatgggaggatttggaccgaagcaccctcccccgcagattctcatcaagaataccccggtacctgcgaatccttctaccaccttcagcgcggcaaagtttgcttccttcatcacacagtactccacggggcaggtcagcgtggagatcgagtgggagctgcagaaagagaacagcaaacgctggaaccccgagatccagtatacctccaactacaacaagtctgttaatgtggactttactgtggacactaatggcgtgtattcagagcctcgccccattggcacaagatacctgactcgtaatctgtaa

SEQ ID NO: 3420 - DNA, 2208 bp, Artificial Sequence
  source: /note="Description of Artificial Sequence: Synthetic polynucleotide"
atggctgccgatggttatcttccagattggctcgaggacactctctctgaaggaataagacagtggtggaagctcaaacctggcccaccaccgccaaagcccgcagagcggcataaggacgacagcaggggtcttgtgcttcctgggtacaagtacctcggacccttcaacggactcgacaaaggagagccggtcaacgaggcagacgccgcggccctcgagcacgacaaggcctacgaccggcagctcgacagcggagacaacccgtacctcaagtacaaccacgccgacgcggagtttcaggagcgccttaaagaagatacgccttttgggggcaacctcgcaagagcagtattccaggcgaaaaagagggttcttgaacctctgggcctggttgaggagcctgttaagacggctccgggaaaaaagaggccggtagggcactctcctgcggagctagattcctcctccggaactggaaagtcgggccaacagcctgcaagaaagagattgaattttggtcagactggagacgcagactccgtacctgacccccagcctctcggacagccaccagcagccccctctggtctgggaactaatacgatggcttcaggcagtggcgcaccaatggcagacaataacgagggcgtcgacggagtgggtaattcctcgggaaattggcattgcgattccacatggatgggcgacagagtcatcaccaccagcacccgcacctgggctctgcccacctacaacaaccatctgtacaagcaaatttccagccagtctggggccagcaacgacaaccactactttggctacagcaccccttgggggtattttgacttcaacagattccactgccacttctccccacgtgactggcaaagactcatcaacaacaattggggattccggcccaaaagactcaacttcaagctctttaacattcaagtcaaggaggtcacgcagaatgacggtacgacgacgattgccaataaccttaccagcacggttcaggtgtttactgactcggagtaccagctcccgtacgtcctcggctcggcgcatcaaggatgcctcccgccgttcccagcagacgtcttcatggtgccacagtatggatacctcaccctgaacaacgggagtcaggcggtaggacgctcttcattttactgcctggagtactttccttctcagatgctgcgtaccggaaacaactttaccttcagctacacctttgaggacgttccttttcacagcagctacgctcacagccagagtttggaccgtctcatgaatcctctcatcgaccagtacctgtattacttgagcagaacaaacactccaagcggaaccactacgcagtccaggcttcagttttctcaagccggagcgagtgacattcgggaccagtctaggaactggcttcctggaccctgttaccgccagcagcgagtatcaaagacagctgcggacaacaacaacagtgattactcgtggactggagctaccaagtatcacctcaatggaagagactctctggtgaatccgggcacagccatggccagccacaaggacgatgaagaaaagtattttcctcagagcggggttctcatcttcggaaaacaagactcgggaaaaactaatgtggacattgaaaaggtcatgattacagacgaagaggaaatcaggaccaccaatcccgtggctacggagcagtatggttctgtatctaccaatctccagagcggcaacacacaagcagctacctcagatgtcaacacacaaggcgttcttccaggcatggtctggcaggacagagacgtgtacctgcagggacccatctgggcaaagattccacacacggacggacattttcacccttctcctcttatgggaggatttggaccgaagcaccctcccccgcagattctcatcaagaataccccggtacctgcgaatccttctaccaccttcagcgcggcaaagtttgcttccttcatcacacagtactccacggggcaggtcagcgtggagatcgagtgggagctgcagaaagagaacagcaaacgctggaaccccgagatccagtatacctccaactacaacaagtctgttaatgtggactttactgtggacactaatggcgtgtattcagagcctcgccccattggcacaagatacctgactcgtaatctgtaa

SEQ ID NO: 3421 - DNA, 2208 bp, Artificial Sequence
  source: /note="Description of Artificial Sequence: Synthetic polynucleotide"
atggctgccgatggttatcttccagattggctcgaggacactctctctgaaggaataagacagtggtgggagctcaaacctggcccaccaccgccaaagcccgcagagcggcataaggacgacagcaggggtcttgtgcttcctgggtacaagtacctcggacccttcaacggactcgacaaaggagagccggtcaacgaggcagacgccgcggccctcgagcacgacaaggcctacgaccggcagctcgacagcggagacaacccgtacctcaagtacaaccacgccgacgcggagtttcaggagcgccttaaagaagatacgtcttttgggggcaacctcgcaagagcagtattccaggcgaaaaagagggttcttgaacctctgggcctggttgaggagcctgttaagacggctccgggaaaaaagaggccggtagagcactctcctgcggagctagattcctcctccggaactggaaagtcgggccaacagcctgcaagaaagagattgaattttggtcagactggagacgcagactccgtacctgacccccagcctctcgggcagccaccagcagccccctctggtctgggaactaatacgatggcttcaggcagtggcgcaccaatggcagacaataacgagggcgccgacggagtgggtaattcctcgggaaattggcattgcgattccacatggatgggcgacagagtcatcaccaccagcacccgcacctgggctctgcccacctacaacaaccatctgtacaagcaaatttccagccagtctggggccagcaacgacaaccactactttggctacagcaccccttgggggtattttgacttcaacagattccactgccacttctccccacgtgactggcaaagactcatcaacaacaattggggattccggcccaaaagactcaacttcaagctctttaacattcaagtcaaggaggtcacgcagaatgacggtacgacgacgattgccaataaccttaccagcacggttcaggtgtttactgactcggagtaccagctcccgtacgtcctcggctcggcgcatcaaggatgcctcccgccgttcccagcagacgtcttcatggtgccacagtatggatacctcaccctgaacaacgggagtcaggcggtaggacgctcttcattttactgcctggagtactttccttctcagatgctgcgtaccggaaacaactttaccttcagctacacctttgaggacgttccttttcacagcagctacgctcacagccagagtttggaccgtctcatgaatcctctcatcgaccagtacctgtattactttagcagaacaaacactccaagcggaaccactacgcagtccaggcttcagttttctcaagccggagcgagtgacattcgggaccagtctaggaactggcttcctggaccctgttaccgccagcagcgagtatcaaagacagctgcggacaacaacaacagtgattactcgtggactggagctaccaagtatcacctcaatggaagagactctctggtgaatccgggcacagccatggccagccacaaggacgatgaagaaaagtattttcctcagagcggggttctcatcttcggaaaacaagactcgggaaaaactaatgtggacattgaaaaggtcatgattacagacgaagaggaaatcaggaccaccaatcccgtggctacggagcagtatggttctgtatctaccaatctccagagcggcaacacacaagcagctacctcagatgtcaacacacaaggcgttcttccaggcatggtctggcaggacagagacgtgtacctgcagggacccatctgggcaaagattccacacacggacggacattttcacccttctcctcttatgggaggatttggaccgaagcaccctcccccgcagattctcatcaagaataccccggtacctgcgaatccttctaccaccttcagcgcggcaaagtttgcttccttcatcacacagtactccacggggcaggtcagcgtggagatcgagtgggagctgcagaaagagaacagcaaacgctggaaccccgagatccagtatacctccaactacaacaagtctgttaatgtggactttactgtggacactaatggcgtgtattcagagcctcgccccattggcacaagatacctgactcgtaatctgtaa

SEQ ID NO: 3422 - DNA, 2208 bp, Artificial Sequence
  source: /note="Description of Artificial Sequence: Synthetic polynucleotide"
atggctgccgatggttatcttccagattggctcgaggacactctctctgaaggaataagacagtggtggaagctcaaacctggcccaccaccgccaaagcccgcagagcggcataaggacgacagcaggggtcttgtgcttcctgggtacaagtacctcggacccttcaacggactcgacaaaggagagccggtcaacgaggcagacgccgcggccctcgagcacgacaaggcctacgaccggcagctcgacagcggagacaacccgtacctcaagtacaaccacgccgacgcggagtttcaggagcgccttaaagaagatacgtcttttgggggcaacctcgcaagagcagtattccaggcgaaaaagagggttcttgaacctctgggcctggttgaggagcctgttaagacggctccgggaaaaaagaggccggtagagcactctcctgcggagctagattcctcctccggaactggaaagtcgggccaacagcctgcaagaaagagattgaattttggtcagactggagacgcagactccgtacctgacccccagcctctcggacagccaccagcagccccctctggtctgggaactaatacgatggcttcaggcagtggcgcaccaatggcagacaataacgagggcgccgacggagtgggtaattcctcgggaaattggcattgcgattccacatggatgggcgacagagtcatcaccaccagcacccgcacctgggctctgcccacctacaacaaccatctgtacaagcaaatttccagccagtctggggccagcaacgacaaccactactttggctacagcaccccttgggggtattttgacttcaacagattccactgccacttctccccacgtgactggcaaagactcatcaacaacaattggggattccggcccaaaagactcaacttcaagctctttaacattcaagtcaaggaggtcacgcagaatgacggtacgacgacgattgccaataaccttaccagcacggttcaggtgtttactgactcggagtaccagctcccgtacgtcctcggctcggcgcatcaaggatgcctcccgccgttcccagcagacgtcttcatggtgccacagtatggatacctcaccctgaacaacgggagtcaggcggtaggacgctcttcattttaccgcctggagtactttccttctcagatgctgcgtaccggaaacaactttaccttcagctacacctttgaggacgttccttttcacagcagctacgctcacagccagagtttggaccgtctcatgaatcctctcatcgaccagtacctgtattacttgagcagaacaaacactccaagcggaaccactacgcagtccaggcttcagttttctcaagccggagcgagtgacattcgggaccagtctaggaactggcttcctggaccctgttaccgccagcagcgagtatcaaagacagctgcggacaacaacaacagtgattactcgtggactggagctaccaagtatcacctcaatggaagagactctctggtgaatccgggcacagccatggccagccacaaggacgatgaagaaaagtattttcctcagagcggggttctcatcttcggaaaacaagactcgggaaaaactaatgtggacattgaaaaggtcatgattacagacgaagaggaaatcaggaccaccaatcccgtggctacggagcagtatggttctgtatctaccaatctccagagcggcaacacacaagcagctacctcagatgtcaacacacaaggcgttcttccaggcatggtctggcaggacagagacgtgtacctgcagggacccatctgggcaaagattccacacacggacggacattttcacccttctcctcttatgggaggatttggaccgaagcaccctcccccgcagattctcatcaagaataccccggtacctgcgaatccttctaccaccttcagcgcggcaaagtttgcttccttcatcacacagtactccacggggcaggtcagcgtggagatcgagtgggagctgcagaaagagaacagcaaacgctggaaccccgagatccagtatacctccaactacaacaagtctgttaatgtggactttactgtggacactaatggcgtgtattcagagcctcgccccattggcacaagatacctgactcgtaatctgtaa

SEQ ID NO: 3423 - DNA, 2208 bp, Artificial Sequence
  source: /note="Description of Artificial Sequence: Synthetic polynucleotide"
atggctgccgatggttatcttccagattggctcgaggacactctctctgaaggaataagacagtggtggaagctcaaacctggcccaccaccgccaaagcccgcagagcggcataaggacgacagcaggggtcttgtgcttcctgggtacaagtacctcggacccttcaacggactcgacaaaggagagccggtcaacgaggcagacgccgcggccctcgagcacgacaaggcctacgaccggcagctcgacagcggagacaacccgtacctcaagtacaaccacgccgacgcggagtttcaggagcgccttaaagaagatacgtcttttgggggcaacctcgcaagagcagtattccaggcgaaaaagagggttcttgaacctctgggcctggttgaggagcctgttaagacggctccgggaaaaaagaggccggtagagcactctcctgcggagctagattcctcctccggaactggaaagtcgggccaacagcctgcaagaaagagattgaattttggtcagactggagacgcagactccgtacctgacccccagcctctcggacagccaccagcagccccctctggtctgggaactaatacgatggcttcaggcagtggcgcaccaatggcagacaataacgagggcgccgacggagtgggtaattcctcgggaaattggcattgcgattccacatggatgggcgacagagtcatcaccaccagcacccgcacctgggctctgcccacctacaacaaccatctgtacaagcaaatttccagccagtctggggccagcaacgacaaccactaccttggctacagcaccccttgggggtattttgacttcaacagattccactgccacttctccccacgtgactggcaaagactcatcaacaacaattggggattccggcccaaaagactcaacttcaagctctttaacattcaagtcaaggaggtcacgcagaatgacggtacgacgacgattgccaataaccttaccagcacggttcaggtgtttactgactcggagtaccagctcccgtacgtcctcggctcggcgcatcaaggatgcctcccgccgttcccagcagacgtcttcatggtgccacagtatggatacctcaccctgaacaacgggagtcaggcggtaggacgctcttcattttactgcctggagtactttccttctcagatgctgcgtaccggaaacaactttaccttcagctacacctttgaggacgttccttttcacagcagctacgctcacagccagagtttggaccgtctcatgaatcctctcatcgaccagtacctgtattacttgagcagaacaaacactccaagcggaaccactacgcagtccaggcttcagttttctcaagccggagcgagtgacattcgggaccagtctaggaactggcttcctggaccctgttaccgccagcagcgagtatcaaagacagctgcggacaacaacaacagtgattactcgtggactggagctaccaagtatcacctcaatggaagagactctctggtgaatccgggcacagccatggccagccacaaggacgatgaagaaaagtattttcctcagagcggggttctcatcttcggaaaacaagactcgggaaaaactaatgtggacattgaaaaggtcatgattacagacgaagaggaaatcaggaccaccaatcccgtggctacggagcagtatggttctgtatctaccaatctccagagcggcaacacacaagcagctacctcagatgtcaacacacaaggcgttcttccaggcatggtctggcaggacggagacgtgtacctgcagggacccatctgggcaaagattccacacacggacggacattttcacccttctcctcttatgggaggatttggaccgaagcaccctcccccgcagattctcatcaagaataccccggtacctgcgaatccttctaccaccttcagcgcggcaaagtttgcttccttcatcacacagtactccacggggcaggtcagcgtggagatcgagtgggagctgcagaaagagaacagcaaacgctggaaccccgagatccagtatacctccaactacaacaagtctgttaatgtggactttactgtggacactaatggcgtgtattcagagcctcgccccattggcacaagatacctgactcgtaatctgtaa

SEQ ID NO: 3424 - DNA, 2208 bp, Artificial Sequence
  source: /note="Description of Artificial Sequence: Synthetic polynucleotide"
atggctgccgatggttatcttccagattggctcgaggacactctctctgaaggaataagacagtggtggaagctcaaacctggcccaccaccgccaaagcccgcagagcggcataaggacgacagcaggggtcttgtgcttcctgggtacaagtacctcggacccttcaacggactcgacaaaggagagccggtcaacgaggcagacgccgcggccctcgagcacgacaaggcctacgaccggcagctcgacagcggagacaacccgtacctcaagtacaaccacgccgacgcggagtttcaggagcgccttaaagaagatacgtcttttgggggcaacctcgcaagagcagtattccaggcgaaaaagagggttcttgaacctctgggcctggttgaggagcctgttaagacggctccgggaaaaaagaggccggtagagcactctcctgcggagctagattcctcctccggaactggaaagtcgggccaacagcctgcaagaaagagattgaattttggtcagactggagacgcagactccgtacctgacccccagcctctcggacagccaccagcagccccctctggtctgggaactaatacgatggcttcaggcagtggcgcaccaatggcagacaataacgagggcgccgacggagtgggtaattcctcgggaaattggcattgcgattccacatggatgggcgacagagtcatcaccaccagcacccgcacctgggctctgcccacctacaacaaccatctgtacaagcaaatttccagccagtctggggccagcaacgacaaccactactttggctacagcaccccttgggggtattttgacttcaacagattccactgccacttctccccacgtgactggcaaagactcatcaacaacaattggggattccggcccaaaagactcaacttcaagctctttaacattcaagtcaaggaggtcacgcagaatgacggtacgacgacgattgccaataaccttaccagcacggttcaggtgtttactgactcggagtaccagctcccgtacgtcctcggctcggcgcatcaaggatgcctcccgccgttcccagcagacgtcttcatggtgccacagtatggatacctcaccctgaacaacgggagtcaggcggtaggacgctcttcattttactgcctggagtactttcctcctcagatgctgcgtaccggaaacaactttaccttcagctacacctttgaggacgttccttttcacagcagctacgctcacagccagagtttggaccgtctcatgaatcctctcatcgaccagtacctgtattacttgagcagaacaaacactccaagcggaaccactacgcagtccaggcttcagttttctcaagccggagcgagtgacattcgggaccagtctaggaactggcttcctggaccctgttaccgccagcagcgagtatcaaagacagctgcggacaacaacaacagtgattactcgtggactggagctaccaagtatcacctcaatggaagagactctctggtgaatccgggcacagccatggccagccacaaggacgatgaagaaaagtattttcctcagagcggggttctcatcttcggaaaacaagactcgggaaaaactaatgtggacattgaaaaggtcatgattacagacgaagaggaaatcaggaccaccaatcccgtggctacggagcagtatggttctgtatctaccaatctccagagcggcaacacacaagcagctacctcagatgtcaacacacaaggcgttcttccaggcatggtctggcaggacagagacgtgtacctgcagggacccatctgggcaaagattccacacacggacggacattttcacccttctcctcttatgggaggatttggaccgaagcaccctcccccgcagattctcatcaagaataccccggtacctgcgaatccttctaccaccttcagcgcggcaaagtttgcttccttcatcacacagtactccacggggcaggtcagcgtggagatcgagtgggagctgcagaaagagaacagcaaacgctggaaccccgagatccagtatacctccaactacaacaagtctgttaatgtggactttactgtggacactaatggcgtgtattcagagcctcgccccattggcacaagatacctgactcgtaatctgtaa

SEQ ID NO: 3425 - DNA, 2208 bp, Artificial Sequence
  source: /note="Description of Artificial Sequence: Synthetic polynucleotide"
atggctgccgatggttatcttccagattggctcgaggacactctctctgaaggaataagacagtggtggaagctcaaacctggcccaccaccgccaaagcccgcagagcggcataaggacgacagcaggggtcttgtgcttcctgggtacaagtacctcggacccttcaacggactcgacaaaggagagccggtcaacgaggcagacgccgcggccctcgagcacgacaaggcctacgaccggcagctcgacagcggagacaacccgtacctcaagtacaaccacgccgacgcggagtttcaggagcgccttaaagaagatacgtcttttgggggcaacctcgcaagagcagtattccaggcgaaaaagagggttcttgaacctctgggcctggttgaggagcctgttaagacggctccgggaaaaaagaggccggtagagcactctcctgcggagctagattcctcctccggaactggaaagtcgggccaacagcctgcaagaaagagattgaattttggtcagactggagacgcagactccgtacctgacccccagcctctcggacagccaccagcagccccctctggtctgggaactaatacgatggcttcaggcagtggcgcaccaatggcagacaataacgagggcgccgacggggtgggtaattcctcgggaaattggcattgcgattccacatggatgggcgacagagtcatcaccaccagcacccgcgcctgggctctgcccacctacaacaaccatctgtacaagcaaatttccagccagtctggggccagcaacgacaaccactaccttggctacagcaccccttgggggtattttgacttcaacagattccactgccacttctccccacgtgactggcaaagactcatcaacaacaattggggattccggcccaaaagactcaacttcaagctctttaacattcaagtcaaggaggtcacgcagaatgacggtacgacgacgattgccaataaccttaccagcacggttcaggtgtttactgactcggagtaccagctcccgtacgtcctcggctcggcgcatcaaggatgccccccgccgttcccagcagacgtcttcatggtgccacagtatggatacctcaccctgaacaacgggagtcaggcggtaggacgctcttcattttactgcctggagtactttccttctcagatgctgcgtaccggaaacaactttaccttcagctacacctttgaggacgttccttttcacagcagctacgctcacagccagagtttggaccgtctcatgaatcctctcatcgaccagtacctgtattacttgagcagaacaaacactccaagcggaaccactacgcagtccaggcttcagttttctcaagccggagcgagtgacattcgggaccagtctaggaactggcttcctggaccctgttaccgccagcagcgagtatcaaagacagctgcggacaacaacaacagtgattactcgtggactggagctaccaagtatcacctcaatggaagagactctctggtgaatccgggcacagccatggccagccacaaggacgatgaagaaaagtattttcctcagagcggggttctcatcttcggaaaacaagactcgggaaaaactaatgtggacattgaaaaggtcatgattacagacgaagaggaaatcaggaccaccaatcccgtggctacggagcagtatggttctgtatctaccaatctccagagcggcaacacacaagcagctacctcagatgtcaacacacaaggcgttcttccaggcatggtctggcaggacagagacgtgtacctgcagggacccatctgggcaaagattccacacacggacggacattttcacccttctcctcttatgggaggatttggaccgaagcaccctcccccgcagattctcatcaagaataccccggtacctgcgaatccttctaccaccttcagcgcggcaaagtttgcttccttcatcacacagtactccacggggcaggtcagcgtggagatcgagtgggagctgcagaaagagaacagcaaacgctggaaccccgagatccagtatacctccaactacaacaagtctgttaatgtggactttactgtggacactaatggcgtgtattcagagcctcgccccattggcacaagatacctgactcgtaatctgtaa

SEQ ID NO: 3426 - DNA, 2208 bp, Artificial Sequence
  source: /note="Description of Artificial Sequence: Synthetic polynucleotide"
atggctgccgatggttatcttccagattggctcgaggacactctctctgaaggaataagacagtggtggaagctcaaacctggcccaccaccgccaaagcccgcagagcggcataaggacgacagcaggggtcttgtgcttcctgggtacaagtacctcggacccttcaacggactcgacaaaggagagccggtcaacgaggcagacgccgcggccctcgagcacgacaaggcctacgaccggcagctcgacagcggagacaacccgtacctcaagtacaaccacgccgacgcggagtttcaggagcgccttaaagaagatacgtcttttgggggcaacctcgcaagagcagtattccaggcgaaaaagagggttcttgaacctctgggcctggttgaggagcctgttaagacggctccgggaaaaaagaggccggtagagcactctcctgcggagctagattcctcctccggaactggaaagtcgggccaacagcctgcaagaaagagattgaattttggtcagactggagacgcagactccgtacctgacccccagcctctcggacagccaccagcagccccctctggtctgggaactaatacgatggcttcaggcagtggcgcaccaatggcagacaataacgagggcgccgacggagtgggtaattcctcgggaaattggcattgcgattccacatggatgggcgacagagtcatcaccaccagcacccgcacctgggctctgcccacctacaacaaccatctgtacaagcaaatttccagccagtctggggccagcaacgacaaccactactttggctacagcaccccttgggggtattttgacttcaacagattccactgccacttctccccacgtgactggcaaagactcatcaacaacaattggggattccggcccaaaagactcaacttcaagctctttaacattcaagtcaaggaggtcacgcagaatgacggtacgacgacgattgccaataaccttaccagcacggttcaggtgtttactgactcggagtaccagctcccgtacgtcctcggctcggcgcatcaaggatgcctcccgccgttcccagcagacgtcttcatggtgccacagtatggatacctcaccctgaacaacgggagtcaggcggtaggacgctcttcattttactgcctggagtactttccttctcagatgctgcgtaccggaaacaactttaccttcagctacacctttgaggacgttccttttcacagcagctacgctcacagccagagtttggaccgtctcatgaatcctctcatcgaccagtacctgtattacttgagcagaacaaacactccaagcggaaccactacgcagtccaggcttcagttttctcaagccggagcgagtgacattcgggaccagtctaggaactggcttcctggaccctgttaccgccagcagcgagtatcaaagacagctgcggacaacaacaacagtgattactcgtggactggagctaccaagtatcacctcaatggaagagactctctggtgaatccgggcacagccatggccagccacaaggacgatgaagaaaagtattttcctcagagcggggttctcatcttcggaaaacaagactcgggaaaaactaatgtggacattgaaaaggtcatgattacagacgaagaggaaatcaggaccaccaatcccgtggctacggagcagtatggttctgtatctaccaatctccagagcggcaacacacaagcagctacctcagatgtcaacacacaaggcgttcttccaggcatggtctggcaggacagagacgtgtacctgcagggacccatctgggcaaagattccacacacggacggacattttcacccttctcctcttatgggaggatttggaccgaagcaccctcccccgcagattctcatcaagaataccccggtacctgcgaatccttctaccaccttcagcgcggcaaagtttgctttcttcatcacacagtactccacggggcaggtcagcgtggagatcgagtgggagctgcagaaagagaacagcaaacgctggaaccccgagatccagtatacctccaactacaacaagtctgttaatgtggactttactgtggacactaatggcgtgtattcagagcctcgccccattggcacaagatacctgactcgtaatctgtaa

SEQ ID NO: 3427 - DNA, 2208 bp, Artificial Sequence
  source: /note="Description of Artificial Sequence: Synthetic polynucleotide"
atggctgccgatggttatcttccagattggctcgaggacactctctctgaaggaataagacagtggtggaagctcaaacctggcccaccaccgccaaagcccgcagagcggcataaggacgacagcaggggtcttgtgcttcctgggtacaagtacctcggacccttcaacggactcgacaaaggagagccggtcaacgaggcagacgccgcggccctcgagcacgacaaggcctacgaccggcagctcgacagcggagacaacccgtacctcaagtacaaccacgccgacgcggagtttcaggagcgccttaaagaagatacgtcttttgggggcaacctcgcaagagcagtattccaggcgaaaaagagggttcttgaacctctgggcctggttgaggagcctgttaagacggctccgggaaaaaagaggccggtagagcactctcctgcggagctagattcctcctccggaactggaaagtcgggccaacagcctgcaagaaagagattgaattttggtcagactggagacgcagactccgtacctgacccccagcctctcggacagccaccagcagccccctctggtctgggaactaatacgatggcttcaggcagtggcgcaccaatggcagacaataacgagggcgccgacggagtgggtaattcctcgggaaattggcattgcgattccacatggatgggcgacagagtcatcaccaccagcacccgcacctgggctctgcccacctacaacaaccatctgtacaagcaaatttccagccagtctggggccagcaacgacaaccactaccttggctacagcaccccttgggggtattttgacttcaacagattccactgccacttctccccacgtgactggcaaagactcatcaacaacaattggggattccggcccaaaagactcaacttcaagctctttaacattcaagtcaaggaggtcacgcagaatgacggtacgacgacgattgccaataaccttaccagcacggttcaggtgtttactgactcggagtaccagctcccgtacgtcctcggctcggcgcatcaaggatgcctcccgccgttcccagcagacgtcttcatggtgccacagtatggatacctcaccctgaacaacgggagtcaggcggtaggacgctcttcattttaccgcctggagtactttccttctcagatgctgcgtaccggaaacaactttaccttcagctacacctttgaggacgttccttttcacagcagctacgctcacagccagagtttggaccgtctcatgaatcctctcatcgaccagtacctgtattacttgagcagaacaaacactccaagcggaaccactacgcagtccaggcttcagttttctcaagccggagcgagtgacattcgggaccagtctaggaactggcttcctggaccctgttaccgccagcagcgagtatcaaagacagctgcggacaacaacaacagtgattactcgtggactggagctaccaagtatcacctcaatggaagagactctctggtgaatccgggcacagccatggccagccacaaggacgatgaagaaaagtattttcctcagagcggggttctcatcttcggaaaacaagactcgggaaaaactaatgtggacattgaaaaggtcatgattacagacgaagaggaaatcaggaccaccaatcccgtggctacggagcagtatggttctgtatctaccaatctccagagcggcaacacacaagcagctacctcagatgtcaacacacaaggcgttcttccaggcatggtctggcaggacagagacgtgtacctgcagggacccatctgggcaaagattccacacacggacggacattttcacccttctcctcttatgggaggatttggaccgaagcaccctcccccgcagattctcatcaagaataccccggtacctgcgaatccttctaccaccttcagcgcggcaaagtttgcttccttcatcacacagtactccacggggcaggtcagcgtggagatcgagtgggagctgcagaaagagaacagcaaacgctggaaccccgagatccagtatacctccaactacaacaagtctgttaatgtggactttactgtggacactaatggcgtgtattcagagcctcgccccattggcacaagatacctgactcgtaatctgtaa

SEQ ID NO: 3428 - DNA, 2205 bp, Artificial Sequence
  source: /note="Description of Artificial Sequence: Synthetic polynucleotide"
atggctgccgatggttatcttccagattggctcgaggacactctctctgaaggaataagacagtggtggaagctcaaacctggcccaccaccgccaaagcccgcagagcggcataaggacgacagcaggggtcttgtgcttcctgggtacaagtacctcggacccttcaacggactcgacaaaggagagccggtcaacgaggcagacgccgcggccctcgagcacgacaaggcctacgaccggcagctcgacagcggagacaacccgtacctcaagtacaaccacgccgacgcggagtttcaggagcgccttaaagaagatacgtcttttgggggcaacctcgcaagagcagtattccaggcgaaaaagagggttcttgaacctctgggcctggttgaggagcctgttaagacggctccgggaaaaaagaggccggtagagcactctcctgcggagctagattcctcctccggaactggaaagtcgggccaacagcctgcaagaaagagattgaattttggtcagactggagacgcagactccgtacctgacccccagcctctcggacagccaccagcagccccctctggtctgggaactaatacgatggcttcaggcagtggcgcaccaatggcagacaataacgagggcgccgacggggtgggtaattcctcgggaaattggcattgcgattccacatggatgggcgacagagtcatcaccaccagcacccgcacctgggctctgcccacctacaacaaccatctgtacaagcaaatttccagccagtctggggccagcaacgacaaccactaccttggctacagcaccccttgggggtattttgacttcaacagattccactgccacttctccccacgtgactggcaaagactcatcaacaacaattggggattccggcccaaaagactcaacttcaagctctttaacattcaagtcaaggaggtcacgcagaatgacggtacgacgacgattgccaataaccttaccagcacggttcaggtgtttactgactcggagtaccagctcccgtacgtcctcggctcggcgcatcaaggatgcctcccgccgttcccagcagacgtcttcatggtgccacagtatggatacctcaccctgaacaacgggagtcaggcggtaggacgctcttcattttactgcctggagtactttccttctcagatgctgcgtaccggaaacaactttaccttcagctacacctttgaggacgttccttttcacagcagctacgctcacagccagagtttggaccgtctcatgaatcctctcatcgaccagtacctgtattacttgagcagaacaaacactccaagcggaaccactacgcagtccaggcttcagttttctcaagccggagcgagtgacattcgggaccagtctaggaactggcttcctggaccctgttaccgccagcagcgagtatcaaagacagctgcggacaacaacagtgattactcgtggactggagctaccaagtatcacctcaatggaagagactctctggtgaatccgggcacagccatggccagccacaaggacgatgaagaaaagtattttcctcagagcggggttctcatcttcggaaaacaagactcgggaaaaactaatgtggacattgaaaaggtcatgattacagacgaagaggaaatcaggaccaccaatcccgtggctacggagcagtatggttctgtatctaccaatctccagagcggcaacacacaagcagctacctcagatgtcaacacacaaggcgttcttccaggcatggtctggcaggacagagacgtgtacctgcagggacccatctgggcaaagattccacacacggacggacattttcacccttctcctcttatgggaggatttggaccgaagcaccctcccccgcagattctcatcaagaataccccggtacctgcgaatccttctaccaccttcagcgcggcaaagtttgcttccttcatcacacagtactccacggggcaggtcagcgtggagatcgagtgggagctgcagaaagagaacagcaaacgctggaaccccgagatccagtatacctccaactacaacaagtctgttaatgtggactttactgtggacactaatggcgtgtattcagagcctcgccccattggcacaagatacctgactcgtaatctgtaa

SEQ ID NO: 3429 - DNA, 2205 bp, Artificial Sequence
  source: /note="Description of Artificial Sequence: Synthetic polynucleotide"
atggctgccgatggttatcttccagattggctcgaggacactctctctgaaggaataagacagtggtggaagctcaaacctggcccaccaccgccaaagcccgcagagcggcataaggacgacagcaggggtcttgtgcttcctgggtacaagtacctcggacccttcaacggactcgacaaaggagagccggtcaacgaggcagacgccgcggccctcgagcacgacaaggcctacgaccggcagctcgacagcggagacaacccgtacctcaagtacaaccacgccgacgcggagtttcaggagcgccttaaagaagatacgtctttgggcaacctcgcaagagcagtattccaggcgaaaaagagggttcttgaacctctgggcctggttgaggagcctgttaagacggctccgggaaaaaagaggccggtagagcactctcctgcggagctagattcctcctccggaactggaaagtcgggccaacagcctgcaagaaagagattgaattttggtcagactggagacgcagactccgtacctgacccccagcctctcggacagccaccagcagccccctctggtctgggaactaatacgatggcttcaggcagtggcgcaccaatggcagacaataacgagggcgccgacggagtgggtaattcctcgggaaattggcattgcgattccacatggatgggcgacagagtcatcaccaccagcacccgcacctgggctctgcccacctacaacaaccatctgtacaagcaaatttccagccagtctggggccagcaacgacaaccactactttggctacagcaccccttgggggtattttgacttcaacagattccactgccacttctccccacgtgactggcaaagactcatcaacaacaattggggattccggcccaaaagactcaacttcaagctctttaacattcaagtcaaggaggtcacgcagaatgacggtacgacgacgattgccaataaccttaccagcacggttcaggtgtttactgactcggagtaccagctcccgtacgtcctcggctcggcgcatcaaggatgcctcccgccgttcccagcagacgtcttcatggtgccacagtatggatacctcaccctgaacaacgggagtcaggcggtaggacgctcttcattttactgcctggagtactttccttctcagatgctgcgtaccggaaacaactttaccttcagctacacctttgaggacgttccttttcacagcagctacgctcacagccagagtttggaccgtctcatgaatcctctcatcgaccagtacctgtattacttgagcagaacaaacactccaagcggaaccactacgcagtccaggcttcagttttctcaagccggagcgagtgacattcgggaccagtctaggaactggcttcctggaccctgttaccgccagcagcgagtatcaaagacagctgcggacaacaacaacagtgattactcgtggactggagctaccaagtatcacctcaatggaagagactctctggtgaatccgggcacagccatggccagccacaaggacgatgaagaaaagtattttcctcagagcggggttctcatcttcggaaaacaagactcgggaaaaactaatgtggacattgaaaaggtcatgattacagacgaagaggaaatcaggaccaccaatcccgtggctacggagcagtatggttctgtatctaccaatctccagagcggcaacacacaagcagctacctcagatgtcaacacacaaggcgttcttccaggcatggtctggcaggacagagacgtgtacctgcagggacccatctgggcaaagattccacacacggacggacattttcacccttctcctcttatgggaggatttggaccgaagcaccctcccccgcagattctcatcaagaataccccggtacctgcgaatccttctaccaccttcagcgcggcaaagtttgcttccttcatcacacagtactccacggggcaggtcagcgtggagatcgagtgggagctgcagaaagagaacagcaaacgctggaaccccgagatccagtatacctccaactacaacaagtctgttaatgtggactttactgtggacactaatggcgtgtattcagagcctcgccccattggcacaagatacctgactcgtaatctgtaa

SEQ ID NO: 3430 - DNA, 2208 bp, Artificial Sequence
  source: /note="Description of Artificial Sequence: Synthetic polynucleotide"
atggctgccgatggttatcttccagattggctcgaggacactctctctgaaggaataagacagtggtggaagctcaaacctggcccaccaccgccaaagcccgcagagcggcataaggacgacagcaggggtcttgtgcttcctgggtacaagtacctcggacccttcaacggactcgacaaaggagagccggtcaacgaggcagacgccgcggccctcgagcacgacaaggcctacgaccggcagctcgacagcggagacaacccgtacctcaagtacaaccacgccgacgcggagtttcaggagcgccttaaagaagatacgtcttttgggggcaacctcgcaagagcagtattccaggcgaaaaagagggttcttgaacctctgggcctggttgaggagcctgttaagacggctccgggaaaaaagaggccggtagagcactctcctgcggagctagattcctcctccggaactggaaagtcgggccaacagcctgcaagaaagagattgaattttggtcagactggagacgcagactccgtacctgacccccagcctctcggacagccaccagcagccccctctggtctgggaactaatacgatggcttcaggcagtggcgcaccaatggcagacaataacgagggcgccgacggagtgggtaattcctcgggaaattggcattgcgattccacatggatgggcgacagagtcatcaccaccagcacccgcacctgggctctgcccacctacaacaaccatctgtacaagcaaatttccagccagtctggggccagcaacgacaaccactactttggctacagcaccccttgggggtattttgacttcaacagattccactgccacttctccccacgtgactggcaaagactcatcaacaacaattggggattccggcccaaaagactcaacttcaagctctttaacattcaagtcaaggaggtcacgcagaatgacggtacgacgacgattgccaataaccttaccagcacggttcaggtgtttactgactcggagtaccagctcccgtacgtcctcggctcggcgcatcaaggatgcctcccgccgttcccagcagacgtcttcatggtgccacagtatggatacctcaccctgaacaacgggagtcaggcggtaggacgctcttcattttactgcctggagtactttccttctcagatgctgcgtaccggaaacaactttaccttcagctacacctttgaggacgttccttttcacagcagctacgctcacagccagagtttggaccgtctcatgaatcctctcatcgaccagtacctgtattacttgagcagaacaaacactccaagcggaaccactacgcagtccaggcttcagttttctcaagccggagcgagtgacattcgggaccagtctaggaactggcttcctggaccctgttaccgccagcagcgagtatcaaagacagctgcggacaacaacaacagtgattactcgtggactggagctaccaagtatcacctcaatggaagagactctctggtgaatccgggcacagccatggccagccacaaggacgatgaagaaaagtattttcctcagagcggggttctcatcttcggaaaacaagactcgggaaaaactaatgtggacattgaaaaggtcatgattacagacgaagaggaaatcaggaccaccaatcccgtggctacggagcagtatggttctgtatctaccaatctccagagcggcaacacacaagcagctacctcagatgtcaacacacaaggcgttcttccaggcatggtctggcaggacagagacgtgtacctgcagggacccatctgggcaaagattccacacacggacggacattttcacccttctcctcttatgggaggatttggaccgaagcaccctcccccgcagattctcatcaagaataccccggtacctgcgaatccttctaccaccttcagcgcggcaaagtttgcttccttcatcacacagtactccacggggcaggtcggcgtggagatcgagtgggagctgcagaaagagaacagcaaacgctggaaccccgagatccagtatacctccaactacaacaagtctgttaatgtggactttactgtggacactaatggcgtgtattcagagcctcgccccattggcacaagatacctgactcgtaatctgtaa

SEQ ID NO: 3431 - DNA, 2208 bp, Artificial Sequence
  source: /note="Description of Artificial Sequence: Synthetic polynucleotide"
atggctgccgatggttatcttccagattggctcgaggacactctctctgaaggaataagacagtggtggaagctcaaacctggcccaccaccgccaaagcccgcagagcggcataaggacgacagcaggggtcttgtgcttcctgggtacaagtacctcggacccttcaacggactcgacaaaggagagccggtcaacgaggcagacgccgcggccctcgagcacgacaaggcctacgaccggcagctcgacagcggagacaacccgtacctcaagtacaaccacgccgacgcggagtttcaggagcgccttaaagaagatacgtcttttgggggcaacctcgcaagagcagtattccaggcgaaaaagagggttcttgaacctctgggcctggttgaggagcctgttaagacggctccgggaaaaaagaggccggtagagcactctcctgcggagctagattcctcctccggaactggaaagtcgggccaacagcctgcaagaaagagattgaattttggtcagactggagacgcagactccgtacctgacccccagcctctcggacagccaccagcagccccctctggtctgggaactaatacgatggcttcaggcagtggcgcaccaatggcagacaataacgagggcgccgacggagtgggtaattcctcgggaaattggcattgcgattccacatggatgggcgacagagtcatcaccaccagcacccgcacctgggctctgcccacctacaacaaccatctgtacaagcaaatttccagccagtctggggccagcaacgacaaccactactttggctacagcaccccttgggggtattttgacttcaacagattccactgccacttctccccacgtgactggcaaagactcatcaacaacaattggggattccggcccaaaagactcaacttcaagctctttaacattcaagtcaaggaggtcacgcagaatgacagtacgacgacgattgccaataaccttaccagcacggttcaggtgtttactgactcggagtaccagctcccgtacgtcctcggctcggcgcatcaaggatgcctcccgccgttcccagcagacgtcttcatggtgccacagtatggatacctcaccctgaacaacgggagtcaggcggtaggacgctcttcattttactgcctggagtactttccttctcagatgctgcgtaccggaaacaactttaccttcagctacacctttgaggacgttccttttcacagcagctacgctcacagccagagtttggaccgtctcatgaatcctctcatcgaccagtacctgtattacttgagcagaacaaacactccaagcggaaccactacgcagtccaggcttcagttttctcaagccggagcgagtgacattcgggaccagtctaggaactggcttcctggaccctgttaccgccagcagcgagtatcaaagacagctgcggacaacaacaacagtgattactcgtggactggagctaccaagtatcacctcaatggaagagactctctggtgaatccgggcacagccatggccagccacaaggacgatgaagaaaagtattttcctcagagcggggttctcatcttcggaaaacaagactcgggaaaaactaatgtggacattgaaaaggtcatgattacagacgaagaggaaatcaggaccaccaatcccgtggctacggagcagtatggttctgtatctaccaatctccagagcggcaacacacaagcagctacctcagatgtcaacacacaaggcgttcttccaggcatggtctggcaggacagagacgtgtacctgcagggacccatctgggcaaagattccacacacggacggacattttcacccttctcctcttatgggaggatttggaccgaagcaccctcccccgcagattctcatcaagaataccccggtacctgcgaatccttctaccaccttcagcgcggcaaagtttgcttccttcatcacacagtactccacggggcaggtcagcgtggagatcgagtgggagctgcagaaagagaacagcaaacgctggaaccccgagatccagtatacctccaactacaacaagtctgttaatgtggactttactgtggacactaatggcgtgtattcagagcctcgccccattggcacaagatacctgactcgtaatctgtaa

SEQ ID NO: 3432 - DNA, 2208 bp, Artificial Sequence
  source: /note="Description of Artificial Sequence: Synthetic polynucleotide"
atggctgccgatggttatcttccagattggctcgaggacactctctctgaaggaataagacagtggtggaagctcaaacctggcccaccaccgccaaagcccgcagagcggcataaggacgacagcaggggtcttgtgcttcctgggtacaagtacctcggacccttcaacggactcgacaaaggagagccggtcaacgaggcagacgccgcggccctcgagcacgacaaggcctacgaccggcagctcgacagcggagacaacccgtacctcaagtacaaccacgccgacgcggagtttcaggagcgccttaaagaagatacgtcttttgggggcaacctcgcaagagcagtattccaggcgaaaaagagggttcttgaacctctgggcctggttgaggagcctgttaagacggctccgggaaaaaagaggccggtagagcactctcctgcggagctagattcctcctccggaactggaaagtcgggccaacagcctgcaagaaagagattgaattttggtcagactggagacgcagactccgtacctgacccccagcctctcggacagccaccagcagccccctctggtctgggaactaatacgatggcttcaggcagtggcgcaccaatggcagacaataacgagggcgccgacggagtgggtaattcctcgggaaattggcattgcgattccacatggatgggcgacagagtcatcaccaccagcacccgcacctgggctctgcccacctacaacaaccatctgtacaagcaaatttccagccagtctggggccagcaacgacaaccactactttggctacagcaccccttgggggtattttgacttcaacagattccactgccacttctccccacgtgactggcaaagactcatcaacaacaattggggattccggcccaaaagactcaacttcaagctctttaacattcaagtcaaggaggtcacgcagaatgacggtacgacgacgattgccaataaccttaccagcacggttcaggtgtttactgactcggagtaccagctcccgtacgtcctcggctcggcgcatcaaggatgcctcccgccgttcccagcagacgtcttcatggtgccacagtatggatacctcaccctgaacaacgggagtcaggcggtaggacgctcttcattttactgcctggagtactttccttctcagatgctgcgtaccggaaacaactttaccttcagctacacctttgaggacgttccttttcacagcagctacgctcacagccagagtttggaccgtctcatgaatcctctcatcgaccagtacctgtattacttgagcagaacaaacactccaagcggaaccactacgcagtccaggcttcagttttctcaagccggagcgagtgacattcgggaccagtctaggaactggcttcctggaccctgttaccgccagcagcgagtatcaaagacagctgcggacaacaacaacagtgattactcgtggactggagctaccaagtatcacctcaatggaagagactctctggtgaatccgggcacagccatggccagccacaaggacgatgaagaaaagtattttcctcagagcggggttctcatcttccggaaacaagactcgggaaaaactaatgtggacattgaaaaggtcatgattacagacgaagaggaaatcaggaccaccaatcccgtggctacggagcagtatggttctgtatctaccaatctccagagcggcaacacacaagcagctacctcagatgtcaacacacaaggcgttcttccaggcatggtctggcaggacagagacgtgtacctgcagggacccatctgggcaaagattccacacacggacggacattttcacccttctcctcttatgggaggatttggaccgaagcaccctcccccgcagattctcatcaagaataccccggtacctgcgaatccttctaccaccttcagcgcggcaaagtttgcttacttcatcacacagtactccacggggcaggtcagcgtggagatcgagtgggagctgcagaaagagaacagcaaacgctggaaccccgagatccagtatacctccaactacaacaagtctgttaatgtggactttactgtggacactaatggcgtgtattcagagcctcgccccattggcacaagatacctgactcgtaatctgtaa

SEQ ID NO: 3433 - DNA, 2208 bp, Artificial Sequence
  source: /note="Description of Artificial Sequence: Synthetic polynucleotide"
atggctgccgatggttatcttccagattggctcgaggacactctctctgaaggaataagacagtggtggaagctcaaacctggcccaccaccgccaaagcccgcagagcggcataaggacgacagcaggggtcttgtgcttcctgggtacaagtacctcggacccttcaacggactcgacaaaggagagccggtcaacgaggcagacgccgcggccctcgagcacgacaaggcctacgaccggcagctcgacagcggagacaacccgtacctcaagtacaaccacgccgacgcggagtttcaggagcgccttaaagaagatacgtcttttgggggcaacctcgcaagagcagtattccaggcgaaaaagagggttcttgaacctctgggcctggttgaggagcctgttaagacggctccgggaaaaaagaggccggtagagcactctcctgcggagctagattcctcctccggaactggaaagtcgggccaacagcctgcaagaaagagattgaattttggtcagactggagacgcagactccgtacctgacccccagcctctcggacagccaccagcagccccctctggtctgggaactaatacgatggcttcaggcagtggcgcaccaatggcagacaataacgagggcgccgacggagtgggtaattcctcgggaaattggcattgcgactccacatggatgggcgacagagtcatcaccaccagcacccgcacctgggctctgcccacctacaacaaccatctgtacaagcaaatttccagccagtctggggccagcaacgacaaccactactttggctacagcaccccttgggggtattttgacttcaacagattccactgccacttctccccacgtgactggcaaagactcatcaacaacaattggggattccggcccaaaagactcgacttcaagctctttaacattcaagtcaaggaggtcacgcagaatgacggtacgacgacgattgccaataaccttaccagcacggttcaggtgtttactgactcggagtaccagctcccgtacgtcctcggctcggcgcatcaaggatgcctcccgccgttcccagcagacgtcttcatggtgccacagtatggatacctcaccctgaacaacgggagtcaggcggtaggacgctcttcattttactgcctggagtactttccttctcagatgctgcgtaccggaaacaactttaccttcagctacacctttgaggacgttccttttcacagcagctacgctcacagccagagtttggaccgtctcatgaatcctctcatcgaccagtacctgtattacttgagcagaacaaacactccaagcggaaccactacgcagtccaggcttcagttttctcaagccggagcgagtgacattcgggaccagtctaggaactggcttcctggaccctgttaccgccagcagcgagtatcaaagacagctgcggacaacaacaacagtgattactcgtggactggagctaccaagtatcacctcaatggaagagactctctggtgaatccgggcacagccatggccagccacaaggacgatgaagaaaagtattttcctcagagcggggttctcatcttcggaaaacaagactcgggaaaaactaatgtggacattgaaaaggtcatgattacagacgaagaggaaatcaggaccaccaatcccgtggctacggagcagtatggttctgtatctaccaatctccagagcggcaacacacaagcagctacctcagatgtcaacacacaaggcgttcttccaggcatggtctggcaggacagagacgtgtacctgcagggacccatctgggcaaagattccacacacggacggacattttcacccttctcctcttatgggaggatttggaccgaagcaccctcccccgcagattctcatcaagaataccccggtacctgcgaatccttctaccaccttcagcgcggcaaagtttgcttccttcatcacacagtactccacggggcaggtcagcgtggagatcgagtgggagctgcagaaagagaacagcaaacgctggaaccccgagatccagtatacctccaactacaacaagtctgttaatgtggactttactgtggacactaatggcgtgtattcagagcctcgccccattggcacaagatacctgactcgtaatctgtaa

SEQ ID NO: 3434 - DNA, 2208 bp, Artificial Sequence
  source: /note="Description of Artificial Sequence: Synthetic polynucleotide"
atggctgccgatggttatcttccagattggctcgaggacactctctctgaaggaataagacagtggtggaagctcaaacctggcccaccaccgccaaagcccgcagagcggcataaggacgacagcaggggtcttgtgcttcctgggtacaagtacctcggacccttcaacggactcgacaaaggagagccggtcaacgaggcagacgccgcggccctcgagcacgacaaggcctacgaccggcagctcgacagcggagacaacccgtacctcaagtacaaccacgccgacgcggagtttcaggagcgccttaaagaagatacgtcttttgggggcaacctcgcaagagcagtattccaggcgaaaaagagggttcttgaacctctgggcctggttgaggagcctgttaagacggctccgggaaaaaagaggccggtagagcactctcctgcggagctagattcctcctccggaactggaaagtcgggccaacagcctgcaagaaagagattgaattttggtcagactggaggcgcagactccgtacctgacccccagcctctcggacagccaccagcagccccctctggtctgggaactaatacgatggcttcaggcagtggcgcaccaatggcagacaataacgagggcgccgacggagtgggtaattcctcgggaaattggcattgcgattccacatggatgggcgacagagtcatcaccaccagcacccgcacctgggctctgcccacctacaacaaccatctgtacaagcaaatttccagccagtctggggccagcaacgacaaccactactttggctacagcaccccttgggggtattttgacttcaacagattccactgccacttctccccacgtgactggcaaagactcatcaacaacaattggggattccggcccaaaagactcaacttcaagctctttaacattcaagtcaaggaggtcacgcagaatgacggtacgacgacgattgccaataaccttaccagcacggttcaggtgtttactgactcggagtaccagctcccgtacgtcctcggctcggcgcatcaaggatgcctcccgccgttcccagcagacgtcttcatggtgccacagtatggatacctcaccctgaacaacgggagtcaggcggtaggacgctcttcattttactgcctggagtactttccttctcagatgctgcgtaccggaaacaactttaccttcagctacacctttgaggacgttccttttcacagcagctacgctcacagccagagtttggaccgtctcatgaatcctctcatcgaccagtacctgtattacttgagcagaacaaacactccaagcggaaccactacgcagtccaggcttcagttttctcaagccggagcgagtgacattcgggaccagtctaggaactggcttcctggaccctgttaccgccagcagcgagtatcaaagacagctgcggacaacaacaacagtgattactcgtggactggagctaccaagtatcacctcaatggaagagactctctggtgaatccgggcacagccatggccagccacaaggacgatgaagaaaagtattttcctcagagcggggttctcatcttcggaaaacaagactcgggaaaaactaatgtggacattgaaaaggtcatgattacagacgaagaggaaatcaggaccaccaatcccgtggctacggagcagtatggttctgtatctaccaatctccagagcggcaacacacaagcagctacctcagatgtcaacacacaaggcgttcttccaggcatggtctggcaggacagagacgtgtacctgcagggacccatctgggcaaagattccacacacggacggacattttcacccttctcctcttatgggaggatttggaccgaagcaccctcccccgcagattctcatcaagaataccccggtacctgcgaatccttctaccaccttcagcgcggcaaagtttgcttccttcatcacacagtactccacggggcaggtcagcgtggagatcgagtgggagctgcagaaagagaacagcaaacgctggaaccccgagatccagtatacctccaactacaacaagtctgttaatgtggactttactgtggacactaatggcgtgtattcagagcctcgccccattggcacaagatacctgactcgtaatctgtaa

SEQ ID NO: 3435 - DNA, 2208 bp, Artificial Sequence
  source: /note="Description of Artificial Sequence: Synthetic polynucleotide"
atggctgccgatggttatcttccagattggctcgaggacactctctctgaaggaataagacagtggtggaagctcaaacctggcccaccaccgccaaagcccgcagagcggcataaggacgacagcaggggtcttgtgcttcctgggtacaagtacctcggacccttcaacggactcgacaaaggagagccggtcaacgaggcagacgccgcggccctcgagcacgacaaggcctacgaccggcagctcgacagcggagacaacccgtacctcaagtacaaccacgccgacgcggagtttcaggagcgccttaaagaagatacgtcttttgggggcaacctcgcaagagcagtattccaggcgaaaaagagggttcttgaacctctgggcctggttgaggagcctgttaagacggctccgggaaaaaagaggccggtagagcactctcctgcggagctagattcctcctccggaactggaaagtcgggccaacagcctgcaagaaagagattgaattttggtcagactggagacgcagactccgtacctgacccccagcctctcggacagccaccagcagccccctctggtctgggaactaatacgatggcttcaggcagtggcgcaccaatggcagacaataacgagggcgccgacggagtgggtaattcctcgggaaattggcattgcgattccacatggatgggcgacagagtcatcaccaccagcacccgcacctgggctctgcccacctacaacaaccatctgtacaagcaaatttccagccagtctggggccagcaacgacaaccactactttggctacagcaccccttgggggtattttgacttcaacagattccactgccacttctccccacgtgactggcaaagactcatcaacaacaattggggattccggcccaaaagactcaacttcaagctctttaacattcaagtcaaggaggtcacgcagaatgacggtacgacgacgattgccaataaccttaccagcacggttcaggtgtttactgactcggagtaccagctcccgtacgtcctcggctcggcgcatcaaggatgcctcccgccgttcccagcagacgtcttcatggtgccacagtatggatacctcaccctgaacaacgggagtcaggcggtaggacgctcttcattttactgcctggagtactttccttctcagatgctgcgtaccggaaacaaccttaccttcagctacacctttgaggacgttccttttcacagcagctacgctcacagccagagtttggaccgtctcatgaatcctctcatcgaccagtacctgtattacttgagcagaacaaacactccaagcggaaccactacgcagtccaggcttcagttttctcaagccggagcgagtgacattcgggaccagtctaggaactggcttcctggaccctgttaccgccagcagcgagtatcaaagacagctgcggacaacaacaacagtgattactcgtggactggagctaccaagtatcacctcaatggaagagactctctggtgaatccgggcacagccatggccagccacaaggacgatgaagaaaagtattttcctcagagcggggttctcatcttcggaaaacaagactcgggaaaaactaatgtggacattgaaaaggtcatgattacagacgaagaggaaatcaggaccaccaatcccgtggctacggagcagtatggttctgtatctaccaatctccagagcggcaacacacaagcagctacctcagatgtcaacacacaaggcgttcttccaggcatggtctggcaggacagagacgtgtacctgcagggacccatctgggcaaagattccacacacggacggacattttcacccttctcctcttatgggaggatttggaccgaagcaccctcccccgcagattctcatcaagaataccccggtacctgcgaatccttctaccaccttcagcgcggcaaagtttgcttccttcatcacacagtactccacggggcaggtcagcgtggagatcgagtgggagctgcagaaagagaacagcaaacgctggaaccccgagatccagtatacctccaactacaacaagtctgttaatgtggactttactgtggacactaatggcgtgtattcagagcctcgccccattggcacaagatacctgactcgtaatctgtaa

SEQ ID NO: 3436 - DNA, 2208 bp, Artificial Sequence
  source: /note="Description of Artificial Sequence: Synthetic polynucleotide"
atggctgccgatggttatcttccagattggctcgaggacactctctctgaaggaataagacagtggtggaagctcaaacctggcccaccaccgccaaagcccgcagagcggcataaggacgacagcaggggtcttgtgcttcctgggtacaagtacctcggacccttcaacggactcgacaaaggagagccggtcaacgaggcagacgccgcggccctcgagcacgacaaggcctacgaccggcagctcgacagcggagacaacccgtacctcaagtacaaccacgccgacgcggagtttcaggagcgccttaaagaagatacgtcttttgggggcaacctcgcaagagcagtattccaggcgaaaaagagggttcttgaacctctgggcctggttgaggagcctgttaagacggctccgggaaaaaagaggccggtagagcactctcctgcggagctagattcctcctccggaactggaaagtcgggccaacagcctgcaagaaagagattgaattttggtcagactggagacgcagactccgtacctgacccccagcctctcggacagccaccagcagccccctctggtctgggaactaatacgatggcttcaggcagtggcgcaccaatggcagacaataacgagggcgccgacggagtgggtaattcctcgggaaattggcattgcgattccacatggatgggcgacagagtcatcaccaccagcacccgcacctgggctctgcccacctacaacaaccatctgtacaagcaaatttccagccagtctggggccagcaacgacaaccactactttggctacagcaccccttgggggtattttgacttcaacagattccactgccacttctccccacgtgactggcaaagactcatcaacaacaattggggattccggcccaaaagactcaacttcaagctctttaacattcaagtcaaggaggtcacgcagaatgacggtacgacgacgattgccaataaccttaccagcacggttcaggtgtttactgactcggagtaccagctcccgtacgtcctcggctcggcgcatcaaggatgcctcccgccgttcccagcagacgtcttcatggtgccacagtatggataccacaccctgaacaacgggagtcaggcggtaggacgctcttcattttactgcctggagtactttccttctcagatgctgcgtaccggaaacaactttaccttcagctacacctttgaggacgttccttttcacagcagctacgctcacagccagagtttggaccgtctcatgaatcctctcatcgaccagtacctgtattacttgagcagaacaaacactccaagcggaaccactacgcagtccaggcttcagttttctcaagccggagcgagtgacattcgggaccagtctaggaactggcttcctggaccctgttaccgccagcagcgagtatcaaagacagctgcggacaacaacaacagtgattactcgtggactggagctaccaagtatcacctcaatggaagagactctctggtgaatccgggcacagccatggccagccacaaggacgatgaagaaaagtattttcctcagagcggggttctcatcttcggaaaacaagactcgggaaaaactaatgtggacattgaaaaggtcatgattacagacgaagaggaaatcaggaccaccaatcccgtggctacggagcagtatggttctgtatctaccaatctccagagcggcaacacacaagcagctacctcagatgtcaacacacaaggcgttcttccaggcatggtctggcaggacagagacgtgtacctgcagggacccatctgggcaaagattccacacacggacggacattttcacccttctcctcttatgggaggatttggaccgaagcaccctcccccgcagattctcatcaagaataccccggtacctgcgaatccttctaccaccttcagcgcggcaaagtttgcttccttcatcacacagtactccacggggcaggtcagcgtggagatcgagtgggagctgcagaaagagaacagcaaacgctggaaccccgagatccagtatacctccaactacaacaagtctgttaatgtggactttactgtggacactaatggcgtgtattcagagcctcgccccattggcacaagatacctgactcgtaatctgtaa

SEQ ID NO: 3437 - DNA, 2208 bp, Artificial Sequence
  source: /note="Description of Artificial Sequence: Synthetic polynucleotide"
atggctgccgatggttatcttccagattggctcgaggacactctctctgaaggaataagacagtggtggaagctcaaacctggcccaccaccgccaaagcccgcagagcggcataaggacgacagcaggggtcttgtgcttcctgggtacaagtacctcggacccttcaacggactcgacaaaggagagccggtcaacgaggcagacgccgcggccctcgagcacgacaaggcctacgaccggcagctcgacagcggagacaacccgtacctcaagtacaaccacgccgacgcggagtttcaggagcgccttaaagaagatacgtcttttgggggcaacctcgcaagagcagtattccaggcgaaaaagagggttcttgaacctctgggcctggttgaggagcctgttaagacggctccgggaaaaaagaggccggtagagcactctcctgcggagctagattcctcctccggaactggaaagtcgggccaacagcctgcaagaaagagattgaattttggtcagactggagacgcagactccgtacctgacccccagcctctcggacagccaccagcagccccctctggtctgggaactaatacgatggcttcaggcagtggcgcaccaatggcagacaataacgagggcgccgacggagtgggtaattcctcgggaaattggcattgcgattccacatggatgggcgacagagtcatcaccaccagcacccgcacctgggctctgcccacctacaacaaccatctgtacaagcaaatttccagccagtctggggccagcaacgacaaccactactttggctacagcaccccttgggggtattttgacttcaacagattccactgccacttctccccacgtgactggcaaagactcatcaacaacaattggggattccggcccaaaagactcaacttcaagctctttaacattcaagtcaaggaggtcacgcagaatgacggtacgacgacgattgccaataaccttaccagcacggttcaggtgtttactgactcggagtaccagctcccgtacgtcctcggctcggcgcatcaaggatgcctcccgccgttcccagcagacgtcttcatggtgccacagtatggatacctcaccctgaacaacgggagtcaggcggtaggacgctcttcattttactgcctggagtactttccttctcagatgctgcgtaccggaaacaactttaccttcagctacacctttgaggacgttccttttcacagcagctacgctcacagccagagtttggaccgtctcatgaatcctctcatcgaccagtacccgtattacttgagcagaacaaacactccaagcggaaccactacgcagtccaggcttcagttttctcaagccggagcgagtgacattcgggaccagtctaggaactggcttcctggaccctgttaccgccagcagcgagtatcaaagacagctgcggacaacaacaacagtgattactcgtggactggagctaccaagtatcacctcaatggaagagactctctggtgaatccgggcacagccatggccagccacaaggacgatgaagaaaagtattttcctcagagcggggttctcatcttcggaaaacaagactcgggaaaaactaatgtggacattgaaaaggtcatgattacagacgaagaggaaatcaggaccaccaatcccgtggctacggagcagtatggttctgtatctaccaatctccagagcggcaacacacaagcagctacctcagatgtcaacacacaaggcgttcttccaggcatggtctggcaggacagagacgtgtacctgcagggacccatctgggcaaagattccacacacggacggacattttcacccttctcctcttatgggaggatttggaccgaagcaccctcccccgcagattctcatcaagaataccccggtacctgcgaatccttctaccaccttcagcgcggcaaagtttgcttccttcatcacacagtactccacggggcaggtcagcgtggagatcgagtgggagctgcagaaagagaacagcaaacgctggaaccccgagatccagtatacctccaactacaacaagtctgttaatgtggactttactgtggacactaatggcgtgtattcagagcctcgccccattggcacaagatacctgactcgtaatctgtaa

SEQ ID NO: 3438 - DNA, 2208 bp, Artificial Sequence
  source: /note="Description of Artificial Sequence: Synthetic polynucleotide"
atggctgccgatggttatcttccagattggctcgaggacactctctctgaaggaataagacagtggtggaagctcaaacctggcccaccaccgccaaagcccgcagagcggcataaggacgacagcaggggtcttgtgcttcctgggtacaagtacctcggacccttcaacggactcgacaaaggagagccggtcaacgaggcagacgccgcggccctcgagcacgacaaggcctacgaccggcagctcgacagcggagacaacccgtacctcaagtacaaccacgccgacgcggagtttcaggagcgccttaaagaagatacgtcttttgggggcaacctcgcaagagcagtattccaggcgaaaaagagggttcttgaacctctgggcctggttgaggagcctgttaagacggctccgggaaaaaagaggccggtagagcactctcctgcggagctagattcctcctccggaactggaaagtcgggccaacagcctgcaagaaagagattgaattttggtcagactggagacgcagactccgtacctgacccccagcctctcggacagccaccagcagccccctctggtctgggaactaatacgatggcttcaggcagtggcgcaccaatggcagacaataacgagggcgccgacggagtgggtaattcctcgggaaattggcattgcgattccacatggatgggcgacagagtcatcaccaccagcacccgcacctgggctctgcccacctacaacaaccatctgtacaagcaaatttccagccagtctggggccagcaacgacaaccactactttggctacagcaccccttgggggtattttgacttcaacagattccactgccacttctccccacgtgactggcaaagactcatcaacaacaattggggattccggcccaaaagactcaacttcaagctctttaacattcaagtcaaggaggtcacgcagaatgacggtacgacgacgattgccaataaccttaccagcacggttcaggtgtttactgactcggagtaccagctcccgtacgtcctcggctcggcgcatcaaggatgcctcccgccgttcccagcagacgtcttcatggtgccacagtatggatacctcaccctgaacaacgggagtcaggcggtaggacgctcttcattttactgcctggagtactttccttctcagatgctgcgtaccggaaacaactttaccttcagctacacctttgaggacgttccttttcacagcagctacgctcacagccagagtttggaccgtctcatgaatcctctcatcgaccagtacctgtattacttgagcagaacaaacactccaagcggaaccactacgcagtccaggcttcagttttctcaagccggagcgagtgacattcgggaccagtctaggaactggcttcctggaccctgttaccgccagcagcgagtatcaaagacagctgcggacaacaacaacagtgattactcgtggactggagctaccaagtatcacctcaatggaagagactctctggtgaatccgggcacagccatggccagccacaaggacgatgaagaaaagtattttcctcagagcggggttctcatcttcggaaaacaagactcgggaaaaactaatgtggacattgaaaaggtcatgattacagacgaagaggaaatcaggaccaccaatcccgtggctacggagcagtatggttctgtatctaccaatctccagagcggcaacacacaagcagctacctcagatgtcaacacacaaggcgttcttccaggcatggtctggcaggacagagacgtgtacctgcagggacccatctgggcaaagattccacacacggacggacattttcacccttctcctcttatgggaggatttggaccgaagcaccctcccccgcagattctcatcaagaataccccggtacctgcgaatcctcctaccaccttcagcgcggcaaagtttgcttccttcatcacacagtactccacggggcaggtcagcgtggagatcgagtgggagctgcagaaagagaacagcaaacgctggaaccccgagatccagtatacctccaactacaacaagtctgttaatgtggactttactgtggacactaatggcgtgtattcagagcctcgccccattggcacaagatacctgactcgtaatctgtaa

SEQ ID NO: 3439 - DNA, 2208 bp, Artificial Sequence
  source: /note="Description of Artificial Sequence: Synthetic polynucleotide"
atggctgccgatggttatcttccagattggctcgaggacactctctctgaaggaataagacagtggtggaagctcaaacctggcccaccaccgccaaagcccgcagagcggcataaggacgacagcaggggtcttgtgcttcctgggtacaagtacctcggacccttcaacggactcgacaaaggagagccggtcaacgaggcagacgccgcggccctcgagcacgacaaggcctacgaccggcagctcgacagcggagacaacccgtacctcaagtacaaccacgccgacgcggagtttcaggagcgccttaaagaagatacgtcttttgggggcaacctcgcaagagcagtattccaggcgaaaaagagggttcttgaacctctgggcctggttgaggagcctgttaagacggctccgggaaaaaagaggccggtagagcactctcctgcggagctagattcctcctccggaactggaaagtcgggccaacagcctgcaagaaagagattgaattttggtcagactggagacgcagactccgtacctgacccccagcctctcggacagccaccagcagccccctctggtctgggaactaatacgatggcttcaggcagtggcgcaccaatggcagacaataacgagggcgccgacggagtgggtaattcctcgggaaattggcattgcgattccacatggatgggcgacagagtcatcaccaccagcacccgcacctgggctctgcccacctacaacaaccatctgtacaagcaaatttccagccagtctggggccagcaacgacaaccactactttggctacagcaccccttgggggtattttgacttcaacagattccactgccacttctccccacgtgactggcaaagactcatcaacaacaattggggattccggcccaaaagactcaacttcaagctctttaacattcaagtcaaggaggtcacgcagaatgacggtacgacgacgattgccaataaccttaccagcacggttcaggtgtttactgactcggagtaccagctcccgtacgtcctcggctcggcgcatcaaggatgcctcccgccgttcccagcagacgtcttcatggtgccacagtatggatacctcaccctgaacaacgggagtcaggcggtaggacgctcttcattttactgcctggagtactttccttctcagatgctgcgtaccggaaacaactttaccttcagctacacctttgaggacgttccttttcacagcagctacgctcacagccagagtttggaccgtctcatgaatcctctcatcgaccagtacctgtattacttgagcagaacaaacactccaagcggaaccactacgcagtccaggcttcagttttctcaagccggagcgagtgacattcgggaccagtctaggaactggcttcctggaccctgttaccgccagcagcgagtaccaaagacagctgcggacaacaacaacagtgattactcgtggactggagctaccaagtatcacctcaatggaagagactctctggtgaatccgggcacagccatggccagccacaaggacgatgaagaaaagtattttcctcagagcggggttctcatcttcggaaaacaagactcgggaaaaactaatgtggacattgaaaaggtcatgattacagacgaagaggaaatcaggaccaccaatcccgtggctacggagcagtatggttctgtatctaccaatctccagagcggcaacacacaagcagctacctcagatgtcaacacacaaggcgttcttccaggcatggtctggcaggacagagacgtgtacctgcagggacccatctgggcaaagattccacacacggacggacattttcacccttctcctcttatgggaggatttggaccgaagcaccctcccccgcagattctcatcaagaataccccggtacctgcgaatccttctaccaccttcagcgcggcaaagtttgcttccttcatcacacagtactccacggggcaggtcagcgtggagatcgagtgggagctgcagaaagagaacagcaaacgctggaaccccgagatccagtatacctccaactacaacaagtctgttaatgtggactttactgtggacactaatggcgtgtattcagagcctcgccccattggcacaagatacctgactcgtaatctgtaa

SEQ ID NO: 3440 - DNA, 2208 bp, Artificial Sequence
  source: /note="Description of Artificial Sequence: Synthetic polynucleotide"
atggctgccgatggttatcttccagattggctcgaggacactctctctgaaggaataagacagtggtggaagctcaaacctggcccaccaccgccaaagcccgcagagcggcataaggacgacagcaggggtcttgtgcttcctgggtacaagtacctcggacccttcaacggactcgacaaaggagagccggtcaacgaggcagacgccgcggccctcgagcacgacaaggcctacgaccggcagctcgacagcggagacaacccgtacctcaagtacaaccacgccgacgcggagtttcaggagcgccttaaagaagatacgtcttttgggggcaacctcgcaagagcagtattccaggcgaaaaagagggttcttgaacctctgggcctggttgaggagcctgttaagacggctccgggaaaaaagaggccggtagagcactctcctgcggagctagattcctcctccggaactggaaagtcgggccaacagcctgcaagaaagagattgaattttggtcagactggagacgcagactccgtacctgacccccagcctctcggacagccaccagcagccccctctggtctgggaactaatacgatggcttcaggcagtggcgcaccaatggcagacaataacgagggcgccgacggagtgggtaattcctcgggaaattggcattgcgattccacatggatgggcgacagagtcatcaccaccagcacccgcacctgggctctgcccacctacaacaaccatctgtacaagcaaatttccagccagtctggggccagcaacgacaaccactactttggctacagcaccccttgggggtattttgacttcaacagattccactgccacttctccccacgtgactggcaaagactcatcaacaacaattggggattccggcccaaaagactcaacttcaagctctttaacattcaagtcaaggaggtcacgcagaatgacggtacgacgacgattgccaataaccttaccagcacggttcaggtgtttactgactcggagtaccagctcccgtacgtcctcggctcggcgcatcaaggatgcctcccgccgttcccagcagacgtcttcatggtgccacagtatggatacctcaccctgaacaacgggagtcaggcggtaggacgctcttcattttactgcctggagtactttccttctcagatgctgcgtaccggaaacaactttaccttcagctacacctttgaggacgttccttttcacagcagctacgctcacagccagagtttggaccgtctcatgaatcctctcatcgaccagtacctgtattacttgagcagaacaaacactccaagcggaaccactacgcagtccaggcttcagttttctcaagccggagcgagtgacattcgggaccagtctaggaactggcttcctggaccctgttaccgccagcagcgagtatcaaagacagctgcggacaacaacaacagtgattactcgtggactggagctaccaagtatcacctcaatggaagagactctctggtgaatccgggcacagccatggccagccacaaggacgatgaagaaaagtattttcctcagagcggggttctcatcttcggaaaacaagactcgggaaaaactaatgtggacattgaaaaggtcatgattacagacgaagaggaaatcaggaccaccaatcccgtggctacggagcagtatggttctgtatctaccaatctccagagcggcaacacacaagcagctacctcagatgtcaacacacaaggcgttcttccaggcatggtctggcaggacagagacgtgtacctgcagggacccatctgggcaaagattccacacacggacggacattttcacccttctcctcttatgggaggatttggaccgaagcaccctcccccgcagattctcatcaagaataccccggtacctgcgaatccttctaccaccttcagcgcggcaaagtttgcttccttcatcacacagtactccacggggcaggtcagcgtggagatcgagtgggagctgcagaaagagaacagcaaacgctggaaccccgagatccagtatacctccaactacaacaagtctgttaatgtggactttactgtggacactaatggcgtgtattcagagcctcgccccattggcacaagatacctgactcgtaatctgtaa

SEQ ID NO: 3441 - DNA, 2208 bp, Artificial Sequence
  source: /note="Description of Artificial Sequence: Synthetic polynucleotide"
atggctgccgatggttatcttccagattggctcgaggacactctctctgaaggaataagacagtggtggaagctcaaacctggcccaccaccgccaaagcccgcagagcggcataaggacgacagcaggggtcttgtgcttcctgggtacaagtacctcggacccttcaacggactcgacaaaggagagccggtcaacgaggcagacgccgcggccctcgagcacgacaaggcctacgaccggcagctcgacagcggagacaacccgtacctcaagtacaaccacgccgacgcggagtttcaggagcgccttaaagaagatacgccttttgggggcaacctcgcaagagcagtattccaggcgaaaaagagggttcttgaacctctgggcctggttgaggagcctgttaagacggctccgggaaaaaagaggccggtagagcactctcctgcggagctagattcctcctccggaactggaaagtcgggccaacagcctgcaagaaagagattgaattttggtcagactggagacgcagactccgtacctgacccccagcctctcggacagccaccagcagccccctctggtctgggaactaatacgatggcttcaggcagtggcgcaccaatggcagacaataacgagggcgccgacggagtgggtaattcctcgggaaattggcattgcgattccacatggatgggcgacagagtcatcaccaccagcacccgcacctgggctctgcccacctacaacaaccatctgtacaagcaaatttccagccagtctggggccagcaacgacaaccactactttggctacagcaccccttgggggtattttgacttcaacagattccactgccacttctccccacgtgactggcaaagactcatcaacaacaattggggattccggcccaaaagactcaacttcaagctctttaacattcaagtcaaggaggtcacgcagaatgacggtacgacgacgattgccaataaccttaccagcacggttcaggtgtttactgactcggagtaccagctcccgtacgtcctcggctcggcgcatcaaggatgcctcccgccgttcccagcagacgtcttcatggtgccacagtatggatacctcaccctgaacaacgggagtcaggcggtaggacgctcttcattttactgcctggagtactttccttctcagatgctgcgtaccggaaacaactttaccttcagctacacctttgaggacgttccttttcacagcagctacgctcacagccagagtttggaccgtctcatgaatcctctcatcgaccagtacctgtattacttgagcagaacaaacactccaagcggaaccactacgcagtccaggcttcagttttctcaagccggagcgagtgacattcgggaccagtctaggaactggcttcctggaccctgttaccgccagcagcgagtatcaaagacagctgcggacaacaacaacagtgattactcgtggactggagctaccaagtatcacctcaatggaagagactctctggtgaatccgggcacagccatggccagccacaaggacgatgaagaaaagtattttcctcagagcggggttctcatcttcggaaaacaagactcgggaaaaactaatgtggacattgaaaaggtcatgattacagacgaagaggaaatcaggaccaccaatcccgtggctacggagcagtatggttctgtatctaccaatctccagagcggcaacacacaagcagctacctcagatgtcaacacacaaggcgttcttccaggcatggtctggcaggacagagacgtgtacctgcagggacccatctgggcaaagattccacacacggacggacattttcacccttctcctcttatgggaggatttggaccgaagcaccctcccccgcagattctcatcaagaataccccggtacctgcgaatccttctaccaccttcagcgcggcaaagtttgcttccttcatcacacagtactccacggggcaggtcagcgtggagatcgagtgggagctgcagaaagagaacagcaaacgctggaaccccgagatccagtatacctccaactacaacaagtctgttaatgtggactttactgtggacactaatggcgtgtattcagagcctcgccccattggcacaagatacctgactcgtaatctgtaa

SEQ ID NO: 3442 - DNA, 2208 bp, Artificial Sequence
  source: /note="Description of Artificial Sequence: Synthetic polynucleotide"
atggctgccgatggttatcttccagattggctcgaggacactctctctgaaggaataagacagtggtggaagctcaaacctggcccaccaccgccaaagcccgcagagcggcataaggacgacagcaggggtcttgtgcttcctgggtacaagtacctcggacccttcaacggactcgacaaaggagagccggtcaacgaggcagacgccgcggccctcgagcacgacaaggcctacgaccggcagctcgacagcggagacaacccgtacctcaagtacaaccacgccgacgcggagtttcaggagcgccttaaagaagatacgtcttttgggggcaacctcgcaagagcagtattccaggcgaaaaagagggttcttgaacctctgggcctggttgaggagcctgttaagacggctccgggaaaaaagaggccggtagagcactctcctgcggagctagattcctcctccggaactggaaagtcgggccaacagcctgcaagaaagagattgaattttggtcagactggagacgcagactccgtacctgacccccagcctctcggacagccaccagcagccccctctggtctgggaactaatacgatggcttcaggcagtggcgcaccaatggcagacaataacgagggcgccgacggagtgggtaattcctcgggaaattggcattgcgattccacatggatgggcgacagagtcatcaccaccagcacccgcacctgggctctgcccacctacaacaaccatctgtacaagcaaatttccagccagtctggggccagcaacgacaaccactactttggctacagcaccccttgggggtattttgacttcaacagattccactgccacttctccccacgtgactggcaaagactcatcaacaacaattggggattccggcccaaaagactcaactccaagctctttaacattcaagtcaaggaggtcacgcagaatgacggtacgacgacgattgccaataaccttaccagcacggttcaggtgtttactgactcggagtaccagctcccgtacgtcctcggctcggcgcatcaaggatgcctcccgccgttcccagcagacgtcttcatggtgccacagtatggatacctcaccctgaacaacgggagtcaggcggtaggacgctcttcattttactgcctggagtactttccttctcagatgctgcgtaccggaaacaactttaccttcagctacacctttgaggacgttccttttcacagcagctacgctcacagccagagtttggaccgtctcatgaatcctctcatcgaccagtacctgtattacttgagcagaacaaacactccaagcggaaccactacgcagtccaggcttcagttttctcaagccggagcgagtgacattcgggaccagtctaggaactggcttcctggaccctgttaccgccagcagcgagtatcaaagacagctgcggacaacaacaacagtgattactcgtggactggagctaccaagtatcacctcaatggaagagactctctggtgaatccgggcacagccatggccagccacaaggacgatgaagaaaagtattttcctcagagcggggttctcatcttcggaaaacaagactcgggaaaaactaatgtggacattgaaaaggtcatgattacagacgaagaggaaatcaggaccaccaatcccgtggctacggagcagtatggttctgtatctaccaatctccagagcggcaacacacaagcagctacctcagatgtcaacacacaaggcgttcttccaggcatggtctggcaggacagagacgtgtacctgcagggacccatctgggcaaagattccacacacggacggacattttcacccttctcctcttatgggaggatttggaccgaagcaccctcccccgcagattctcatcaagaataccccggtacctgcgaatccttctaccaccttcagcgcggcaaagtttgcttccttcatcacacagtactccacggggcaggtcagcgtggagatcgagtgggagctgcagaaagagaacagcaaacgctggaaccccgagatccagtatacctccaactacaacaagtctgttaatgtggactttactgtggacactaatggcgtgtattcagagcctcgccccattggcacaagatacctgactcgtaatctgtaa

SEQ ID NO: 3443 - DNA, 2208 bp, Artificial Sequence
  source: /note="Description of Artificial Sequence: Synthetic polynucleotide"
atggctgccgatggttatcttccagattggctcgaggacactctctctgaaggaataagacagtggtggaagctcaaacctggcccaccaccgccaaagcccgcagagcggcataaggacgacagcaggggtcttgtgcttcctgggtacaagtacctcggacccttcaacggactcgacaaaggagagccggtcaacgaggcagacgccgcggccctcgagcacgacaaggcctacgaccggcagctcgacagcggagacaacccgtacctcaagtacaaccacgccgacgcggagtttcaggagcgccttaaagaagatacgtcttttgggggcaacctcgcaagagcagtattccaggcgaaaaagagggttcttgaacctctgggcctggttgaggagcctgttaagacggctccgggaaaaaagaggccggtagagcactctcctgcggagctagattcctcctccggaactggaaagtcgggccaacagcctgcaagaaagagattgaattttggtcagactggagacgcagactccgtacctgacccccagcctctcggacagccaccagcagccccctctggtctgggaactaatacgatggcttcaggcagtggcgcaccaatggcagacaataacgagggcgccgacggagtgggtaattcctcgggaaattggcattgcgattccacatggatgggcgacagagtcatcaccaccagcacccgcacctgggctctgcccacctacaacaaccatctgtacaagcaaatttccagccagtctggggccagcaacgacaaccactactttggctacagcaccccttgggggtattttgacttcaacagattccactgccacttctccccacgtgactggcaaagactcatcaacaacaattggggattccggcccaaaagactcaacttcaagctctttaacattcaagtcaaggaggtcacgcagaatgacggtacgacgacgattgccaataaccttaccagcacggttcaggtgtttactgactcggagtaccagctcccgtacgtcctcggctcggcgcatcaaggatgcctcccgccgttcccagcagacgtcttcatggtgccacagtatggatacctcaccctgaacaacgggagtcaggcggtaggacgctcttcattttactgcctggagtactttccttctcagatgctgcgtaccggaaacaactttaccttcagctacacctttgaggacgttccttttcacagcagctacgctcacagccagggtttggaccgtctcatgaatcctctcatcgaccagtacctgtattacttgagcagaacaaacactccaagcggaaccactacgcagtccaggcttcagttttctcaagccggagcgagtgacattcgggaccagtctaggaactggcttcctggaccctgttaccgccagcagcgagtatcaaagacagctgcggacaacaacaacagtgattactcgtggactggagctaccaagtatcacctcaatggaagagactctctggtgaatccgggcacagccatggccagccacaaggacgatgaagaaaagtattttcctcagagcggggttctcatcttcggaaaacaagactcgggaaaaactaatgtggacattgaaaaggtcatgattacagacgaagaggaaatcaggaccaccaatcccgtggctacggagcagtatggttctgtatctaccaatctccagagcggcaacacacaagcagctacctcagatgtcaacacacaaggcgttcttccaggcatggtctggcaggacagagacgtgtacctgcagggacccatctgggcaaagattccacacacggacggacattttcacccttctcctcttatgggaggatttggaccgaagcaccctcccccgcagattctcatcaagaataccccggtacctgcgaatccttctaccaccttcagcgcggcaaagtttgcttccttcatcacacagtactccacggggcaggtcagcgtggagatcgagtgggagctgcagaaagagaacagcaaacgctggaaccccgagatccagtatacctccaactacaacaagtctgttaatgtggactttactgtggacactaatggcgtgtattcagagcctcgccccattggcacaagatacctgactcgtaatctgtaa

SEQ ID NO: 3444 - DNA, 2208 bp, Artificial Sequence
  source: /note="Description of Artificial Sequence: Synthetic polynucleotide"
atggctgccgatggttatcttccagattggctcgaggacactctctctgaaggaataagacagtggtggaagctcaaacctggcccaccaccgccaaagcccgcagagcggcataaggacgacagcaggggtcttgtgcttcctgggtacaagtacctcggacccttcaacggactcgacaaaggagagccggtcaacgaggcagacgccgcggccctcgagcacgacaaggcctacgaccggcagctcgacagcggagacaacccgtacctcaagtacaaccacgccgacgcggagtttcaggagcgccttaaagaagatacgtcttttgggggcaacctcgcaagagcagtattccaggcgaaaaagagggttcttgaacctctgggcctggttgaggagcctgttaagacggctccgggaaaaaagaggccggtagagcactctcctgcggagctagattcctcctccggaactggaaagtcgggccaacagcctgcaagaaagagattgaattttggtcagactggagacgcagactccgtacctgacccccagcctctcggacagccaccagcagccccctctggtctgggaactaatacgatggcttcaggcagtggcgcaccaatggcagacaataacgagggcgccgacggagtgggtaattcctcgggaaattggcattgcgattccacatggatgggcgacagagtcatcaccaccagcacccgcacctgggctctgcccacctacaacaaccatctgtacaagcaaatttccagccagtctggggccagcaacgacaaccactactttggctacagcaccccttgggggtattttgacttcaacagattccactgccacttctccccacgtgactggcaaagactcatcaacaacaattggggattccggcccaaaagactcaacttcaagctctttaacattcaagtcaaggaggtcacgcagaatgacggtacgacgacgattgccaataaccttaccagcacggttcaggtgtttactgactcggagtaccagctcccgtacgtcctcggctcggcgcatcaaggatgcctcccgccgctcccagcagacgtcttcatggtgccacagtatggatacctcaccctgaacaacgggagtcaggcggtaggacgctcttcattttactgcctggagtactttccttctcagatgctgcgtaccggaaacaactttaccttcagctacacctttgaggacgttccttttcacagcagctacgctcacagccagagtttggaccgtctcatgaatcctctcatcgaccagtacctgtattacttgagcagaacaaacactccaagcggaaccactacgcagtccaggcttcagttttctcaagccggagcgagtgacattcgggaccagtctaggaactggcttcctggaccctgttaccgccagcagcgagtatcaaagacagctgcggacaacaacaacagtgattactcgtggactggagctaccaagtatcacctcaatggaagagactctctggtgaatccgggcacagccatggccagccacaaggacgatgaagaaaagtattttcctcagagcggggttctcatcttcggaaaacaagactcgggaaaaactaatgtggacattgaaaaggtcatgattacagacgaagaggaaatcaggaccaccaatcccgtggctacggagcagtatggttctgtatctaccaatctccagagcggcaacacacaagcagctacctcagatgtcaacacacaaggcgttcttccaggcatggtctggcaggacagagacgtgtacctgcagggacccatctgggcaaagattccacacacggacggacattttcacccttctcctcttatgggaggatttggaccgaagcaccctcccccgcagattctcatcaagaataccccggtacctgcgaatccttctaccaccttcagcgcggcaaagtttgcttccttcatcacacagtactccacggggcaggtcagcgtggagatcgagtgggagctgcagaaagagaacagcaaacgctggaaccccgagatccagtatacctccaactacaacaagtctgttaatgtggactttactgtggacactaatggcgtgtattcagagcctcgccccattggcacaagatacctgactcgtaatctgtaa

SEQ ID NO: 3445 - DNA, 2208 bp, Artificial Sequence
  source: /note="Description of Artificial Sequence: Synthetic polynucleotide"
atggctgccgatggttatcttccagattggctcgaggacactctctctgaaggaataagacagtggtggaagctcaaacctggcccaccaccgccaaagcccgcagagcggcataaggacgacagcaggggtcttgtgcttcctgggtacaagtacctcggacccttcaacggactcgacaaaggagagccggtcaacgaggcagacgccgcggccctcgagcacgacaaggcctacgaccggcagctcgacagcggagacaacccgtacctcaagtacaaccacgccgacgcggagtttcaggagcgccttaaagaagatacgtcttttgggggcaacctcgcaagagcagtattccaggcgaaaaagagggttcttgaacctctgggcctggttgaggagcctgttaagacggctccgggaaaaaagaggccggtagagcactctcctgcggagctagattcctcctccggaactggaaagtcgggccaacagcctgcaagaaagagattgaattttggtcagactggagacgcagactccgtacctgacccccagcctctcggacagccaccagcagccccctctggtctgggaactaatacgatggcttcaggcagtggcgcaccaatggcagacaataacgagggcgccgacggagtgggtaattcctcgggaaattggcattgcgattccacatggatgggcgacagagtcatcaccaccagcacccgcacctgggctctgcccacctacaacaaccatctgtacaagcaaatttccagccagtctggggccagcaacgacaaccactactttggctacagcaccccttgggggtattttgacttcaacagattccactgccacttctccccacgtgactggcaaagacccatcaacaacaattggggattccggcccaaaagactcaacttcaagctctttaacattcaagtcaaggaggtcacgcagaatgacggtacgacgacgattgccaataaccttaccagcacggttcaggtgtttactgactcggagtaccagctcccgtacgtcctcggctcggcgcatcaaggatgcctcccgccgttcccagcagacgtcttcatggtgccacagtatggatacctcaccctgaacaacgggagtcaggcggtaggacgctcttcattttactgcctggagtactttccttctcagatgctgcgtaccggaaacaactttaccttcagctacacctttgaggacgttccttttcacagcagctacgctcacagccagagtttggaccgtctcatgaatcctctcatcgaccagtacctgtattacttgagcagaacaaacactccaagcggaaccactacgcagtccaggcttcagttttctcaagccggagcgagtgacattcgggaccagtctaggaactggcttcctggaccctgttaccgccagcagcgagtatcaaagacagctgcggacaacaacaacagtgattactcgtggactggagctaccaagtatcacctcaatggaagagactctctggtgaatccgggcacagccatggccagccacaaggacgatgaagaaaagtattttcctcagagcggggttctcatcttcggaaaacaagactcgggaaaaactaatgtggacattgaaaaggtcatgattacagacgaagaggaaatcaggaccaccaatcccgtggctacggagcagtatggttctgtatctaccaatctccagagcggcaacacacaagcagctacctcagatgtcaacacacaaggcgttcttccaggcatggtctggcaggacagagacgtgtacctgcagggacccatctgggcaaagattccacacacggacggacattttcacccttctcctcttatgggaggatttggaccgaagcaccctcccccgcagattctcatcaagaataccccggtacctgcgaatccttctaccaccttcagcgcggcaaagtttgcttccttcatcacacagtactccacggggcaggtcagcgtggagatcgagtgggagctgcagaaagagaacagcaaacgctggaaccccgagatccagtatacctccaactacaacaagtctgttaatgtggactttactgtggacactaatggcgtgtattcagagcctcgccccattggcacaagatacctgactcgtaatctgtaa

SEQ ID NO: 3446 - DNA, 2208 bp, Artificial Sequence
  source: /note="Description of Artificial Sequence: Synthetic polynucleotide"
atggctgccgatggttatcttccagattggctcgaggacactctctctgaaggaataagacagtggtggaagctcaaacctggcccaccaccgccaaagcccgcagagcggcataaggacgacagcaggggtcttgtgcttcctgggtacaagtacctcggacccttcaacggactcgacaaaggagagccggtcaacgaggcagacgccgcggccctcgagcacgacgaggcctacgaccggcagctcgacagcggagacaacccgtacctcaagtacaaccacgccgacgcggagtttcaggagcgccttaaagaagatacgtcttttgggggcaacctcgcaagagcagtattccaggcgaaaaagagggttcttgaacctctgggcctggttgaggagcctgttaagacggctccgggaaaaaagaggccggtagagcactctcctgcggagctagattcctcctccggaactggaaagtcgggccaacagcctgcaagaaagagattgaattttggtcagactggagacgcagactccgtacctgacccccagcctctcggacagccaccagcagccccctctggtctgggaactaatacgatggcttcaggcagtggcgcaccaatggcagacaataacgagggcgccgacggagtgggtaattcctcgggaaattggcattgcgattccacatggatgggcgacagagtcatcaccaccagcacccgcacctgggctctgcccacctacaacaaccatctgtacaagcaaatttccagccagtctggggccagcaacgacaaccactactttggctacagcaccccttgggggtattttgacttcaacagattccactgccacttctccccacgtgactggcaaagactcatcaacaacaattggggattccggcccaaaagactcaacttcaagctctttaacattcaagtcaaggaggtcacgcagaatgacggtacgacgacgattgtcaataaccttaccagcacggttcaggtgtttactgactcggagtaccagctcccgtacgtcctcggctcggcgcatcaaggatgcctcccgccgttcccagcagacgtcttcatggtgccacagtatggatacctcaccctgaacaacgggagtcaggcggtaggacgctcttcattttactgcctggagtactttccttctcagatgctgcgtaccggaaacaactttaccttcagctacacctttgaggacgttccttttcacagcagctacgctcacagccagagtttggaccgtctcatgaatcctctcatcgaccagtacctgtattacttgagcagaacaaacactccaagcggaaccactacgcagtccaggcttcagttttctcaagccggagcgagtgacattcgggaccagtctaggaactggcttcctggaccctgttaccgccagcagcgagtatcaaagacagctgcggacaacaacaacagtgattactcgtggactggagctaccaagtatcacctcaatggaagagactctctggtgaatccgggcacagccatggccagccacaaggacgatgaagaaaagtattttcctcagagcggggttctcatcttcggaaaacaagactcgggaaaaactaatgtggacattgaaaaggtcatgattacagacgaagaggaaatcaggaccaccaatcccgtggctacggagcagtatggttctgtatctaccaatctccagagcggcaacacacaagcagctacctcagatgtcaacacacaaggcgttcttccaggcatggtctggcaggacagagacgtgtacctgcagggacccatctgggcaaagattccacacacggacggacattttcacccttctcctcttatgggaggatttggaccgaagcaccctcccccgcagattctcatcaagaataccccggtacctgcgaatccttctaccaccttcagcgcggcaaagtttgcttacttcatcacacagtactccacggggcaggtcagcgtggagatcgagtgggagctgcagaaagggaacagcaaacgctggaaccccgagatccagtatacctccaactacaacaagtctgttaatgtggactttactgtggacactaatggcgtgtattcagagcctcgccccattggcacaagatacctgactcgtaatctgtaa

SEQ ID NO: 3447 - DNA, 2208 bp, Artificial Sequence
  source: /note="Description of Artificial Sequence: Synthetic polynucleotide"
atggctgccgatggttatcttccagattggctcgaggacactctctctgaaggaataagacagtggtggaagctcaaacctggcccaccaccgccaaagcccgcagagcggcataaggacgacagcaggggtcttgtgcttcctgggtacaagtacctcggacccttcaacggactcgacaaaggagagccggtcaacgaggcagacgccgcggccctcgagcacgacaaggcctacgaccggcagctcgacagcggagacaacccgtacctcaagtacaaccacgccgacgcggagtttcaggagcgccttaaagaagatacgtcttttgggggcaacctcgcaagagcagtattccaggcgaaaaagagggttcttgaacctctgggcctggttgaggagcctgttaagacggctccgggaaaaaagaggccggtagagcactctcctgcggagctagattcctcctccggaactggaaagtcgggccaacagcctgcaagaaagagattgaattttggtcagactggagacgcagactccgtacctgacccccagcctctcggacagccaccagcagccccctctggtctgggaactaatacgatggcttcaggcagtggcgcaccaatggcagacaataacgagggcgccgacggagtgggtaattcctcgggaaattggcattgcgattccacatggatgggcgacagagtcatcaccaccagcacccgcacctgggctctgcccacctacaacaaccatctgtacaagcaaatttccagccagtctggggccagcaacgacaaccactactttggctacagcaccccttgggggtattttgacttcaacagattccactgccacttctccccacgtgactggcaaagactcatcaacaacaattggggattccggcccaaaagactcaacttcaagctctttaacattcaagtcaaggaggtcacgcagaatgacggtacgacgacgattgccaataaccttaccagcacggttcaggtgtttactgactcggagtaccagctcccgtacgtcctcggctcggcgcatcaaggatgcctcccgccgttcccagcagacgtcttcatggtgccacagtatggatacctcaccctgaacaacgggagtcaggcggtaggacgctcttcattttactgcctggagtactttccttctcagatgctgcgtaccggaaacaactgtaccttcagctacacctttgaggacgttccttttcacagcagctacgctcacagccagagtttggaccgtctcatgaatcctctcatcgaccagtacctgtattacttgagcagaacaaacactccaagcggaaccactacgcagtccaggcttcagttttctcaagccggagcgagtgacattcgggaccagtctaggaactggcttcctggaccctgttaccgccagcagcgagtatcaaagacagctgcggacaacaacaacagtgattactcgtggactggagctaccaagtatcacctcaatggaagagactctctggtgaatccgggcacagccatggccagccacaaggacgatgaagaaaagtattttcctcagagcggggttctcatcttcggaaaacaagactcgggaaaaactaatgtggacattgaaaaggtcatgattacagacgaagaggaaatcaggaccaccaatcccgtggctacggagcagtatggttctgtatctaccaatctccagagcggcaacacacaagcagctacctcagatgtcaacacacaaggcgttcttccaggcatggtctggcaggacagagacgtgtacctgcagggacccatctgggcaaagattccacacacggacggacattttcacccttctcctcttatgggaggatttggaccgaagcaccctcccccgcagattctcatcaagaataccccggtacctgcgaatccttctaccaccttcagcgcggcaaagtttgcttccttcatcacacagtactccacggggcaggtcagcgtggagatcgagtgggagctgcagaaagagaacagcaaacgctggaaccccgagatccagtatacctccaactacaacaagtctgttaatgtggactttactgtggacactaatggcgtgtattcagagcctcgccccattggcacaagatacctgactcgtaatctgtaa

SEQ ID NO: 3448 - DNA, 2208 bp, Artificial Sequence
  source: /note="Description of Artificial Sequence: Synthetic polynucleotide"
atggctgccgatggttatcttccagattggctcgaggacactctctctgaaggaataagacagtggtggaagctcaaacctggcccaccaccgccaaagcccgcagagcggcataaggacgacagcaggggtcttgtgcttcctgggtacaagtacctcggacccttcaacggactcgacaaaggagagccggtcaacgaggcagacgccgcggccctcgagcacgacaaggcctacgaccggcagctcgacagcggagacaacccgtacctcaagtacaaccacgccgacgcggagtttcaggagcgccttaaagaagatacgtcttttgggggcaacctcgcaagagcagtattccaggcgaaaaagagggttcttgaacctctgggcctggttgaggagcctgttaagacggctccgggaaaaaagaggccggtagagcactctcctgcggagctagattcctcctccggaactggaaagtcgggccaacagcctgcaagaaagagattgaattttggtcagactggagacgcagactccgtacctgacccccagcctctcggacagccaccagcagccccctctggtctgggaactaatacgatggcttcaggcagtggcgcaccaatggcagacaataacgagggcgccgacggagtgggtaattcctcgggaaattggcattgcgattccacatggatgggcgacagagtcatcaccaccagcacccgcacctgggctctgcccacctacaacaaccatctgtacaagcaaatttccagccagtctggggccagcaacgacaaccactactttggctacagcaccccttgggggtattttgacttcaacagattccactgccacttctccccacgtgactggcaaagactcatcaacaacaattggggattccggcccaaaagacccaacttcaagctctttaacattcaagtcaaggaggtcacgcagaatgacggtacgacgacgattgccaataaccttaccagcacggttcaggtgtttactgactcggagtaccagctcccgtacgtcctcggctcggcgcatcaaggatgcctcccgccgttcccagcagacgtcttcatggtgccacagtatggatacctcaccctgaacaacgggagtcaggcggtaggacgctcttcattttactgcctggagtactttccttctcagatgctgcgtaccggaaacaactttaccttcagctacacctttgaggacgttccttttcacagcagctacgctcacagccagagtttggaccgtctcatgaatcctctcatcgaccagtacctgtattacttgagcagaacaaacactccaagcggaaccactacgcagtccaggcttcagttttctcaagccggagcgagtgacattcgggaccagtctaggaactggcttcctggaccctgttaccgccagcagcgagtatcaaagacagctgcggacaacaacaacagtgattactcgtggactggagctaccaagtatcacctcaatggaagagactctctggtgaatccgggcacagccatggccagccacaaggacgatgaagaaaagtattttcctcagagcggggttctcatcttcggaaaacaagactcgggaaaaactaatgtggacattgaaaaggtcatgattacagacgaagaggaaatcaggaccaccaatcccgtggctacggagcagtatggttctgtatctaccaatctccagagcggcaacacacaagcagctacctcagatgtcaacacacaaggcgttcttccaggcatggtctggcaggacagagacgtgtacctgcagggacccatctgggcaaagattccacacacggacggacattttcacccttctcctcttatgggaggatttggaccgaagcaccctcccccgcagattctcatcaagaataccccggtacctgcgaatccttctaccaccttcagcgcggcaaagtttgcttccttcatcacacagtactccacggggcaggtcagcgtggagatcgagtgggagctgcagaaagagaacagcaaacgctggaaccccgagatccagtatacctccaactacaacaagtctgttaatgtggactttactgtggacactaatggcgtgtattcagagcctcgccccattggcacaagatacctgactcgtaatctgtaa

SEQ ID NO: 3449 - DNA, 2208 bp, Artificial Sequence
  source: /note="Description of Artificial Sequence: Synthetic polynucleotide"
atggctgccgatggttatcttccagattggctcgaggacactctctctgaaggaataagacagtggtggaagctcaaacctggcccaccaccgccaaagcccgcagagcggcataaggacgacagcaggggtcttgtgcttcctgggtacaagtacctcggacccttcaacggactcgacaaaggagagccggtcaacgaggcagacgccgcggccctcgagcacgacaaggcctacgaccggcagctcgacagcggagacaacccgtacctcaagtacaaccacgccgacgcggagtttcaggagcgccttaaagaagatacgtcttttgggggcaacctcgcaagagcagtattccaggcgaaaaagagggttcttgaacctctgggcctggttgaggagcctgttaagacggctccgggaaaaaagaggccggtagagcactctcctgcggagctagattcctcctccggaactggaaagtcgggccaacagcctgcaagaaagagattgaattttggtcagactggagacgcagactccgtacctgacccccagcctctcggacagccaccagcagccccctctggtctgggaactaatacgatggcttcaggcagtggcgcaccaatggcaggcaataacgagggcgccgacggagtgggtaattcctcgggaaattggcattgcgattccacatggatgggcgacagagtcatcaccaccagcacccgcacctgggctctgcccacctacaacaaccatctgtacaagcaaatttccagccagtctggggccagcaacgacaaccactactttggctacagcaccccttgggggtattttgacttcaacagattccactgccacttctccccacgtgactggcaaagactcatcaacaacaattggggattccggcccaaaagactcaacttcaagctctttaacattcaagtcaaggaggtcacgcagaatgacggtacgacgacgattgccaataaccttaccagcacggttcaggtgtttactgactcggagtaccagctcccgtacgtcctcggctcggcgcatcaaggatgcctcccgccgttcccagcagacgtcttcatggtgccacagtatggatacctcaccctgaacaacgggagtcaggcggtaggacgctcttcattttactgcctggagtactttccttctcagatgctgcgtaccggaaacaactttaccttcagctacacctttgaggacgttccttttcacagcagctacgctcacagccagagtttggaccgtctcatgaatcctctcatcgaccagtacctgtattacttgagcagaacaaacactccaagcggaaccactacgcagtccaggcttcagttttctcaagccggagcgagtgacattcgggaccagtctaggaactggcttcctggaccctgttaccgccagcagcgagtatcaaagacagctgcggacaacaacaacagtgattactcgtggactggagctaccaagtatcacctcaatggaagagactctctggtgaatccgggcacagccatggccagccacaaggacgatgaagaaaagtattttcctcagagcggggttctcatcttcggaaaacaagactcgggaaaaactaatgtggacattgaaaaggtcatgattacagacgaagaggaaatcaggaccaccaatcccgtggctacggagcagtatggttctgtatctaccaatctccagagcggcaacacacaagcagctacctcagatgtcaacacacaaggcgttcttccaggcatggtctggcaggacagagacgtgtacctgcagggacccatctgggcaaagattccacacacggacggacattttcacccttctcctcttatgggaggatttggaccgaagcaccctcccccgcagattctcatcaagaataccccggtacctgcgaatccttctaccaccttcagcgcggcaaagtttgcttccttcatcacacagtactccacggggcaggtcagcgtggagatcgagtgggagctgcagaaagagaacagcaaacgctggaaccccgagatccagtatacctccaactacaacaagtctgttaatgtggactttactgtggacactaatggcgtgtattcagagcctcgccccattggcacaagatacctgactcgtaatctgtaa

SEQ ID NO: 3450 - DNA, 2208 bp, Artificial Sequence
  source: /note="Description of Artificial Sequence: Synthetic polynucleotide"
atggctgccgatggttatcttccagattggctcgaggacactctctctgaaggaataagacagtggtggaagctcaaacctggcccaccaccgccaaagcccgcagagcggcataaggacgacagcaggggtcttgtgcttcctgggtacaagtacctcggacccttcaacggactcgacaaaggagagccggtcaacgaggcagacgccgcggccctcgagcacgacaaggcctacgaccggcagctcgacagcggagacaacccgtacctcaagtacaaccacgccgacgcggagtttcaggagcgccttaaagaagatacgccttttgggggcaacctcgcaagagcagtattccaggcgaaaaagagggttcttgaacctctgggcctggttgaggagcctgttaagacggctccgggaaaaaagaggccggtagagcactctcctgcggagctagattcctcctccggaactggaaagtcgggccaacagcctgcaagaaagagattgaattttggtcagactggagacgcagactccgtacctgacccccagcctctcggacagccaccagcagccccctctggtctgggaactaatacgatggcttcaggcagtggcgcaccaatggcagacaataacgagggcgccgacggagtgggtaattcctcgggaaattggcattgcgattccacatggatgggcgacagagtcatcaccaccagcacccgcacctgggctctgcccacctacaacaaccatctgtacaagcaaatttccagccagtctggggccagcaacgacaaccactactttggctacagcaccccttgggggtattttgacttcaacagattccactgccacttctccccacgtgactggcaaagactcatcaacaacaattggggattccggcccaaaagactcaacttcaagctctttaacattcaagtcaaggaggtcacgcagaatgacggtacgacgacgattgccaataaccttaccagcacggttcaggtgtttactgactcggagtaccagctcccgtacgtcctcggctcggcgcatcaaggatgcctcccgccgttcccagcagacgtcttcatggtgccacagtatggatacctcaccctgaacaacgggagtcaggcggtaggacgctcttcattttactgcctggagtactttccttctcagatgctgcgtaccggaaacaactttaccttcagctacacctttgaggacgttccttttcacagcagctacgctcacagccagagtttggaccgtctcatgaatcctctcatcgaccagtacctgtattacttgagcagaacaaacactccaagcggaaccactacgcagtccaggcttcagttttctcaagccggagcgagtgacattcgggaccagtctaggaactggcttcctggaccctgttaccgccagcagcgagtatcaaagacagctgcggacaacaacaacagtgattactcgtggactggagctaccaagtatcacctcaatggaagagactctctggtgaatccgggcacagccatggccagccacaaggacgatgaagaaaagtattttcctcagagcggggttctcatcttcggaaaacaagactcgggaaaaactaatgtggacattgaaaaggtcatgattacagacgaagaggaaatcaggaccaccaatcccgtggctacggagcagtatggttctgtatctaccaatctccagagcggcaacacacaagcagctacctcagatgtcaacacacaaggcgttcttccaggcatggtctggcaggacagagacgtgtacctgcagggacccatctgggcaaagattccacacacggacggacattttcacccttctcctcttatgggaggatttggaccgaagcaccctcccccgcagattctcatcaagaataccccggtacctgcgaatccttctaccaccttcagcgcggcaaagtttgcttccttcatcacacagtactccacggggcaggtcagcgtggagatcgagtgggagctgcagaaagagaacagcaaacgctggaaccccgagatccagtatacctccaactacaacaagtctgttaatgtggactttactatggacactaatggcgtgtattcagagcctcgccccattggcacaagatacctgactcgtaatctgtaa

SEQ ID NO: 3451 - DNA, 2208 bp, Artificial Sequence
  source: /note="Description of Artificial Sequence: Synthetic polynucleotide"
atggctgccgatggttatcttccagattggctcgaggacactctctctgaaggaataagacagtggtggaagctcaaacctggcccaccaccgccaaagcccgcagagcggcataaggacgacagcaggggtcttgtgcttcctgggtacaagtacctcggacccttcaacggactcgacaaaggagagccggtcaacgaggcagacgccgcggccctcgagcacgacaaggcctacgaccggcagctcgacagcggagacaacccgtacctcaagtacaaccacgccgacgcggagtttcaggagcgccttaaagaagatacgtcttttgggggcaacctcgcaagagcagtattccaggcgaaaaagagggttcttgaacctctgggcctggttgaggagcctgttaagacggctccgggaaaaaagaggccggtagagcactctcctgcggagctagattcctcctccggaactggaaagtcgggccaacagcctgcaagaaagagattgaattttggtcagactggagacgcagactccgtacctgacccccagcctctcggacagccaccagcagccccctctggtctgggaactaatacgatggcttcaggcagtggcgcaccaatggcagacaataacgagggcgccgacggagtgggtaattcctcgggaaattggcattgcgattccacatggatgggcgacagagtcatcaccaccagcacccgcacctgggctctgcccacctacaacaaccatctgtacaagcaaatttccagccagtctggggccagcaacgacaaccactactttggctacagcaccccttgggggtattttgacttcaacagattccactgccacttctccccacgtgactggcaaagactcatcaacaacaattggggattccggcccaaaagactcaacttcaagctctttaacattcaagtcaaggaggtcacgcagaatgacggtacgacgacgattgccaataaccttaccagcacggttcaggtgtttactgactcggagtaccagctcccgtacgtcctcggctcggcgcatcaaggatgcctcccgccgttcccagcagacgtcttcatggtgccacagtatggatacctcaccctgaacaacgggagtcaggcggtaggacgctcttcattttactgcctggagtactttccttctcagatgctgcgtaccggaaacaactttaccttcagctacacctttgaggacgttccttttcacagcagctacgctcacagccagagtttggaccgtctcatgaatcctctcatcgaccagtacctgtattacttgagcagaacaaacactccaagcggaaccactacgcagcccaggcttcagttttctcaagccggagcgagtgacattcgggaccagtctaggaactggcttcctggaccctgttaccgccagcagcgagtatcaaagacagctgcggacaacaacaacagtgattactcgtggactggagctaccaagtatcacctcaatggaagagactctctggtgaatccgggcacagccatggccagccacaaggacgatgaagaaaagtattttcctcagagcggggttctcatcttcggaaaacaagactcgggaaaaactaatgtggacattgaaaaggtcatgattacagacgaagaggaaatcaggaccaccaatcccgtggctacggagcagtatggttctgtatctaccaatctccagagcggcaacacacaagcagctacctcagatgtcaacacacaaggcgttcttccaggcatggtctggcaggacagagacgtgtacctgcagggacccatctgggcaaagattccacacacggacggacattttcacccttctcctcttatgggaggatttggaccgaagcaccctcccccgcagattctcatcaagaataccccggtacctgcgaatccttctaccaccttcagcgcggcaaagtttgcttccttcatcacacagtactccacggggcaggtcagcgtggagatcgagtgggagctgcagaaagagaacagcaaacgctggaaccccgagatccagtatacctccaactacaacaagtctgttaatgtggactttactgtggacactaatggcgtgtattcagagcctcgccccattggcacaagatacctgactcgtaatctgtaa

SEQ ID NO: 3452 - DNA, 2208 bp, Artificial Sequence
  source: /note="Description of Artificial Sequence: Synthetic polynucleotide"
atggctgccgatggttatcttccagattggctcgaggacactctctctgaaggaataagacagtggtggaagctcaaacctggcccaccaccgccaaagcccgcagagcggcataaggacgacagcaggggtcttgtgcttcctgggtacaagtacctcggacccttcaacggactcgacaaaggagagccggtcaacgaggcagacgccgcggccctcgagcacgacaaggcctacgaccggcagctcgacagcggagacaacccgtacctcaagtacaaccacgccgacgcggagtttcaggagcgccttaaagaagatacgtcttttgggggcaacctcgcaagagcagtattccaggcgaaaaagagggttcttgaacctctgggcctggttgaggagcctgttaagacggctccgggaaaaaagaggccggtagagcactctcctgcggagctagattcctcctccggaactggaaagtcgggccaacagcctgcaagaaagagattgaattttggtcagactggagacgcagactccgtacctgacccccagcctctcggacagccaccagcagccccctctggtctgggaactaatacgatggcttcaggcagtggcgcaccaatggcagacaataacgagggcgccgacggagtgggtaattcctcgggaaattggcattgcgattccacatggatgggcgacagagtcatcaccaccagcacccgcacctgggctctgcccacctacaacaaccatctgtacaagcaaatttccagccagtctggggccagcaacgacaaccactactttggctacagcaccccttgggggtattttgacttcaacagattccactgccacttctccccacgtgactggcaaagactcatcaacaacaattggggattccggcccaaaagactcaacttcaagctctttaacattcaagtcaaggaggtcacgcagaatgacggtacgacgacgattgccaataaccttaccagcacggttcaggtgtttactgactcggagtaccagctcccgtacgtcctcggctcggcgcatcaaggatgcctcccgccgttcccagcagacgtcttcatggtgccacagtatggatacctcaccctgaacaacgggagtcaggcggtaggacgctcttcattttactgcctggagtactttccttctcagatgctgcgtaccggaaacaactttaccttcagctacacctttgaggacgttccttttcacagcagctacgctcacagccagagtttggaccgtctcatgaatcctctcatcgaccagtacctgtattacttgagcagaacaaacactccaagcggaaccactacgcagtccaggcttcagttttctcaagccggagcgagtgacattcgggaccagtctaggaactggcttcctggaccctgttaccgccagcagcgagtatcaaagacagctgcggacaacaacaacagtgattactcgtggactggagctaccaagcatcacctcaatggaagagactctctggtgaatccgggcacagccatggccagccacaaggacgatgaagaaaagtattttcctcagagcggggttctcatcttcggaaaacaagactcgggaaaaactaatgtggacattgaaaaggtcatgattacagacgaagaggaaatcaggaccaccaatcccgtggctacggagcagtatggttctgtatctaccaatctccagagcggcaacacacaagcagctacctcagatgtcaacacacaaggcgttcttccaggcatggtctggcaggacagagacgtgtacctgcagggacccatctgggcaaagattccacacacggacggacatttccacccttctcctcttatgggaggatttggaccgaagcaccctcccccgcagattctcatcaagaataccccggtacctgcgaatccttctaccaccttcagcgcggcaaagtttgcttccttcatcacacagtactccacggggcaggtcagcgtggagatcgagtgggagctgcagaaagagaacagcaaacgctggaaccccgagatccagtatacctccaactacaacaagtctgttaatgtggactttactgtggacactaatggcgtgtattcagagcctcgccccattggcacaagatacctgactcgtaatctgtaa

SEQ ID NO: 3453 - DNA, 2208 bp, Artificial Sequence
  source: /note="Description of Artificial Sequence: Synthetic polynucleotide"
atggctgccgatggttatcttccagattggctcgaggacactctctctgaaggaataagacagtggtggaagctcaaacctggcccaccaccgccaaagcccgcagagcggcataaggacgacagcaggggtcttgtgcttcctgggtacaagtacctcggacccttcaacggactcgacaaaggagagccggtcaacgaggcagacgccgcggccctcgagcacgacaaggcctacgaccggcagctcgacagcggagacaacccgtacctcaagtacaaccacgccgacgcggagtttcaggagcgccttaaagaagatacgtcttttgggggcaacctcgcaagagcagtattccaggcgaaaaagagggttcttgaacctctgggcctggttgaggagcctgttaagacggctccgggaaaaaagaggccggtagagcactctcctgcggagctagattcctcctccggaactggaaagtcgggccaacagcctgcaagaaagagattgaattttggtcagactggagacgcagactccgtacctgacccccagcctctcggacagccaccagcagccccctctggtctgggaactaatacgatggcttcaggcagtggcgcaccaatggcagacaataacgagggcgccgacggagtgggtaattcctcgggaaattggcattgcgattccacatggatgggcgacagagtcatcaccaccagcacccgcacctgggctctgcccacctacaacaaccatctgtacaagcaaatttccagccagtctggggccagcaacgacaaccactactttggctacagcaccccttgggggtattttgacctcaacagattccactgccacttctccccacgtgactggcaaagactcatcaacaacaattggggattccggcccaaaagactcaacttcaagctctttaacattcaagtcaaggaggtcacgcagaatgacggtacgacgacgattgccaataaccttaccagcacggttcaggtgtttactgactcggagtaccagctcccgtacgtcctcggctcggcgcatcaaggatgcctcccgccgttcccagcagacgtcttcatggtgccacagtatggatacctcaccctgaacaacgggagtcaggcggtaggacgctcttcattttactgcctggagtactttccttctcagatgctgcgtaccggaaacaactttaccttcagctacacctttgaggacgttccttttcacagcagctacgctcacagccagagtttggaccgtctcatgaatcctctcatcgaccagtacctgtattacttgagcagaacaaacactccaagcggaaccactacgcagtccaggcttcagttttctcaagccggagcgagtgacattcgggaccagtctaggaactggcttcctggaccctgttaccgccagcagcgagtatcaaagacagctgcggacaacaacaacagtgattactcgtggactggagctaccaagtatcacctcaatggaagagactctctggtgaatccgggcacagccatggccagccacaaggacgatgaagaaaagtattttcctcagagcggggttctcatcttcggaaaacaagactcgggaaaaactaatgtggacattgaaaaggtcatgattacagacgaagaggaaatcaggaccaccaatcccgtggctacggagcagtatggttctgtatctaccaatctccagagcggcaacacacaagcagctacctcagatgtcaacacacaaggcgttcttccaggcatggtctggcaggacagagacgtgtacctgcagggacccatctgggcaaagattccacacacggacggacattttcacccttctcctcttatgggaggatttggaccgaagcaccctcccccgcagattctcatcaagaataccccggtacctgcgaatccttctaccaccttcagcgcggcaaagtttgcttccttcatcacacagtactccacggggcaggtcagcgtggagatcgagtgggagctgcagaaagagaacagcaaacgctggaaccccgagatccagtatacctccaactacaacaagtctgttaatgtggactttactgtggacactaatggcgtgtattcagagcctcgccccattggcacaagatacctgactcgtaatctgtaa

SEQ ID NO: 3454 - DNA, 2208 bp, Artificial Sequence
  source: /note="Description of Artificial Sequence: Synthetic polynucleotide"
atggctgccgatggttatcttccagattggctcgaggacactctctctgaaggaataagacagtggtggaagctcaaacctggcccaccaccgccaaagcccgcagagcggcataaggacgacagcaggggtcttgtgcttcctgggtacaagtacctcggacccctcaacggactcgacaaaggagagccggtcaacgaggcagacgccgcggccctcgagcacgacaaggcctacgaccggcagctcgacagcggagacaacccgtacctcaagtacaaccacgccgacgcggagtttcaggagcgccttaaagaagatacgtcttttgggggcaacctcgcaagagcagtattccaggcgaaaaagagggttcttgaacctctgggcctggttgaggagcctgttaagacggctccgggaaaaaagaggccggtagagcactctcctgcggagctagattcctcctccggaactggaaagtcgggccaacagcctgcaagaaagagattgaattttggtcagactggagacgcagactccgtacctgacccccagcctctcggacagccaccagcagccccctctggtctgggaactaatacgatggcttcaggcagtggcgcaccaatggcagacaataacgagggcgccgacggagtgggtaattcctcgggaaattggcattgcgattccacatggatgggcgacagagtcatcaccaccagcacccgcacctgggctctgcccacctacaacaaccatctgtacaagcaaatttccagccagtctggggccagcaacgacaaccactactttggctacagcaccccttgggggtattttgacttcaacagattccactgccacttctccccacgtgactggcaaagactcatcaacaacaattggggattccggcccaaaagactcaacttcaagctctttaacattcaagtcaaggaggtcacgcagaatgacggtacgacgacgattgccaataaccttaccagcacggttcaggtgtttactgactcggagtaccagctcccgtacgtcctcggctcggcgcatcaaggatgcctcccgccgttcccagcagacgtcttcatggtgccacagtatggatacctcaccctgaacaacgggagtcaggcggtaggacgctcttcattttactgcctggagtactttccttctcagatgctgcgtaccggaaacaactttaccttcagctacacctttgaggacgttccttttcacagcagctacgctcacagccagagtttggaccgtctcatgaatcctctcatcgaccagtacctgtattacttgagcagaacaaacactccaagcggaaccactacgcagtccaggcttcagttttctcaagccggagcgagtgacattcgggaccagtctaggaactggcttcctggaccctgttaccgccagcagcgagtatcaaagacagctgcggacaacaacaacagtgattactcgtggactggagctaccaagtatcacctcaatggaagagactctctggtgaatccgggcacagccatggccagccacaaggacgatgaagaaaagtattttcctcagagcggggttctcatcttcggaaaacaagactcgggaaaaactaatgtggacattgaaaaggtcatgattacagacgaagaggaaatcaggaccaccaatcccgtggctacggagcagtatggttctgtatctaccaatctccagagcggcaacacacaagcagctacctcagatgtcaacacacaaggcgttcttccaggcatggtctggcaggacagagacgtgtacctgcagggacccatctgggcaaagattccacacacggacggacattttcacccttctcctcttatgggaggatttggaccgaagcaccctcccccgcagattctcatcaagaataccccggtacctgcgaatccttctaccaccttcagcgcggcaaagtttgcttccttcatcacacagtactccacggggcaggtcagcgtggagatcgagtgggagctgcagaaagagaacagcaaacgctggaaccccgagatccagtatacctccaactacaacaagtctgttaatgtggactttactgtggacactaatggcgtgtattcagagcctcgccccattggcacaagatacctgactcgtaatctgtaa

SEQ ID NO: 3455 - DNA, 2208 bp, Artificial Sequence
  source: /note="Description of Artificial Sequence: Synthetic polynucleotide"
atggctgccgatggttatcttccagattggctcgaggacactctctctgaaggaataagacagtggtggaagctcaaacctggcccaccaccgccaaagcccgcagagcggcataaggacgacagcaggggtcttgtgcttcctgggtacaagtacctcggacccttcaacggactcgacaaaggagagccggtcaacgaggcagacgccgcggccctcgagcacgacaaggcctacgaccggcagctcgacagcggagacaacccgtacctcaagtacaaccacgccgacgcggagtttcaggagcgccttaaagaagatacgtcttttgggggcaacctcgcaagagcagtattccaggcgaaaaagagggttcttgaacctctgggcctggttgaggagcctgttaagacggctccgggaaaaaagaggccggtagagcactctcctgcggagctagattcctcctccggaactggaaagtcgggccaacagcctgcaagaaagagattgaattttggtcagactggagacgcagactccgtacctgacccccagcctctcggacagccaccagcagccccctctggtctgggaactaatacgatggcttcaggcagtggcgcaccaatggcagacaataacgagggcgccgacggagtgggtaattcctcgggaaattggcattgcgattccacatggatgggcgacagagtcatcaccaccagcacccgcacctgggctctgcccacctacaacaaccatctgtacaagcaaatttccagccagtctggggccagcaacgacaaccactactttggctacagcaccccttgggggtattttgacttcaacagattccactgccacttctccccacgtgactggcaaagactcatcaacaacaattggggattccggcccaaaagactcaacttcaagctctttaacattcaagtcaaggaggtcacgcagaatgacggtacgacgacgattgccaataaccttaccagcacggttcaggtgtttactgactcggagtaccagctcccgtacgtcctcggctcggcgcatcaaggatgcctcccgccgttcccagcagacgtcttcatggtgccacagtatggatacctcaccctgaacaacgggagtcaggcggtaggacgctcttcattttactgcctggagtactttccttctcagatgctgcgtaccggaaacaactttaccttcagctacacctttgaggacgttccttttcacagcagctacgctcacagccagagtttggaccgtctcatgaatcctctcatcgaccagtacctgtattacttgagcagaacaaacactccaagcggaaccactacgcagtccaggcttcagttttctcaagccggagcgagtgacattcgggaccagtctaggaactggcttcctggaccctgttaccgccagcagcgagtatcaaagacagctgcggacaacaacaacagtgattactcgtggactggagctaccaagtatcacctcaatggaagagactctctggtgaatccgggcacagccatggccagccacaaggacgatgaagaaaagtattttcctcagagcggggttctcatcttcggaaaacaagactcgggaaaaactaatgtggacattgaaaaggtcatgattacagacgaagaggaaatcaggaccaccaatcccgtggctacggagcagtatggttctgtatctaccaatctccagagcggcaacacacaagcagctacctcagatgtcaacacacaaggcgttcttccaggcatggtctggcaggacagagacgtgtacctgcagggacccatctgggcaaagattccacacacggacggacattttcacccttctcctcttatgggaggatttggaccgaagcaccctcccccgcagattctcatcaagaataccccggtacctgcgaatccttctaccaccttcagcgcggcaaagtttgcttccttcatcacacagtactccacggggcaggtcagcgtggagatcgagtgggagctgcagaaagagaacagcaaacgctggaaccccgagatccagtatacctccaactacaacaagtctgttaatgtggactttactgtggacactaatggcgtgtattcagagcctcgccccattggcacaagatacctggctcgtaatctgtaa

SEQ ID NO: 3456 - DNA, 2208 bp, Artificial Sequence
  source: /note="Description of Artificial Sequence: Synthetic polynucleotide"
atggctgccgatggttatcttccagattggctcgaggacactctctctgaaggaataagacagtggtggaagctcaaacctggcccaccaccgccaaagcccgcagagcggcataaggacgacagcaggggtcttgtgcttcctgggtacaagtacctcggacccttcaacggactcgacaaaggagagccggtcaacgaggcagacgccgcggccctcgagcacgacaaggcctacgaccggcagctcgacagcggagacaacccgtacctcaagtacaaccacgccgacgcggagtttcaggagcgccttaaagaagatacgtcttttgggggcaacctcgcaagagcagtattccaggcgaaaaagagggttcttgaacctctgggcctggttgaggagcctgttaagacggctccgggaaaaaagaggccggtagagcactctcctgcggagctagattcctcctccggaactggaaagtcgggccaacagcctgcaagaaagagattgaattttggtcagactggagacgcagactccgtacctgacccccagcctctcggacagccaccagcagccccctctggtctgggaactaatacgatggcttcaggcagtggcgcaccaatggcagacaataacgagggcgccgacggagtgggtaattcctcgggaaattggcattgcgattccacatggatgggcgacagagtcatcaccaccagcacccgcacctgggctctgcccacctacaacaaccatctgtacaagcaaatttccagccagtctggggccagcaacgacaaccactactttggctacagcaccccttgggggtattttgacttcaacagattccactgccacttctccccacgtgactggcaaagactcatcaacaacaattggggattccggcccaaaagactcaacttcaagctctttaacattcaagtcaaggaggtcacgcagaatgacggtacgacgacgattgccaataaccttaccagcacggttcaggtgtttactgactcggagtaccagctcccgtacgtcctcggctcggcgcatcaaggatgcctcccgccgttcccagcagacgtcttcatggtgccacagtatggatacctcaccctgaacaacgggagtcaggcggtaggacgctcttcattttactgcctggagtactttccttctcagatgctgcgtaccggaaacaactttaccctcagctacacctttgaggacgttccttttcacagcagctacgctcacagccagagtttggaccgtctcatgaatcctctcatcgaccagtacctgtattacttgagcagaacaaacactccaagcggaaccactacgcagtccaggcttcagttttctcaagccggagcgagtgacattcgggaccagtctaggaactggcttcctggaccctgttaccgccagcagcgagtatcaaagacagctgcggacaacaacaacagtgattactcgtggactggagctaccaagtatcacctcaatggaagagactctctggtgaatccgggcacagccatggccagccacaaggacgatgaagaaaagtattttcctcagagcggggttctcatcttcggaaaacaagactcgggaaaaactaatgtggacattgaaaaggtcatgattacagacgaagaggaaatcaggaccaccaatcccgtggctacggagcagtatggttctgtatctaccaatctccagagcggcaacacacaagcagctacctcagatgtcaacacacaaggcgttcttccaggcatggtctggcaggacagagacgtgtacctgcagggacccatctgggcaaagattccacacacggacggacattttcacccttctcctcttatgggaggatttggaccgaagcaccctcccccgcagattctcatcaagaataccccggtacctgcgaatccttctaccaccttcagcgcggcaaagtttgcttccttcatcacacagtactccacggggcaggtcagcgtggagatcgagtgggagctgcagaaagagaacagcaaacgctggaaccccgagatccagtatacctccaactacaacaagtctgttaatgtggactttactgtggacactaatggcgtgtattcagagcctcgccccattggcacaagatacctgactcgtaatctgtaa

SEQ ID NO: 3457 - DNA, 2208 bp, Artificial Sequence
  source: /note="Description of Artificial Sequence: Synthetic polynucleotide"
atggctgccgatggttatcttccagattggctcgaggacactctctctgaaggaataagacagtggtggaagctcaaacctggcccaccaccgccaaagcccgcagagcggcataaggacgacagcaggggtcttgtgcttcctgggtacaagtacctcggacccttcaacggactcgacaaaggagagccggtcaacgaggcagacgccgcggccctcgagcacgacaaggcctacgaccggcagctcgacagcggagacaacccgtacctcaagtacaaccacgccgacgcggagtttcaggagcgccttaaagaagatacgtcttttgggggcaacctcgcaagagcagtattccaggcgaaaaagagggttcttgaacctctgggcctggttgaggagcctgttaagacggctccgggaaaaaagaggccggtagagcactctcctgcggagctagattcctcctccggaactggaaagtcgggccaacagcctgcaagaaagagattgaattttggtcagactggagacgcagactccgtacctgacccccagcctctcggacagccaccagcagccccctctggtctgggaactaatacgatggcttcaggcagtggcgcaccaatggcagacaataacgagggcgccgacggagtgggtaattcctcgggaaattggcattgcgattccacatggatgggcgacagagtcatcaccaccagcacccgcacctgggctctgcccacctacaacaaccatctgtacaagcaaatttccagccagtctggggccagcaacgacaaccactactttggctacagcaccccttgggggtattttgacttcaacagattccactgccacttctccccacgtgactggcaaagactcatcaacaacaattggggattccggcccaaaagactcaacttcaagctctttaacattcaagtcaaggaggtcacgcagaatgacggtacgacgacgattgccaataaccttaccagcacggttcaggtgtttactgactcggagtaccagctcccgtacgtcctcggctcggcgcatcaaggatgcctcccgccgttcccagcagacgtcttcatggtgccacagtatggatacctcaccctgaacaacgggagtcaggcggtaggacgctcttcattttactgcctggagtactttccttctcagatgctgcgtaccggaaacaactttaccttcagctacacctttgaggacgttccttttcacagcagctacgctcacagccagagtttggaccgtctcatgaatcctctcatcgaccagtacctgtattacttgagcagaacaaacactccaagcggaaccactacgcagtccaggcttcagttttctcaagccggagcgagtgacattcgggaccagtctaggaactggcttcctggaccctgttaccgccagcagcgagtatcaaagacagctgcggacaacaacaacagtgattactcgtggactggagctaccaagtatcacctcaatggaagagactctctggtgaatccgggcacagccatggccagccacaaggacgatgaagaaaagtattttcctcagagcggggttctcatcttccggaaacaagactcgggaaaaactaatgtggacattgaaaaggtcatgattacagacgaagaggaaatcaggaccaccaatcccgtggctacggagcagtatggttctgtatctaccaatctccagagcggcaacacacaagcagctacctcagatgtcaacacacaaggcgttcttccaggcatggtctggcaggacagagacgtgtacctgcagggacccatctgggcaaagattccacacacggacggacattttcacccttctcctcttatgggaggatttggaccgaagcaccctcccccgcagattctcatcaagaataccccggtacctgcgaatccttctaccaccttcagcgcggcaaagtttgcttccttcatcacacagtactccacggggcaggtcagcgtggagatcgagtgggagctgcagaaagagaacagcaaacgctggaaccccgagatccagtatacctccaactacaacaagtctgttaatgtggactttactgtggacactaatggcgtgtattcagagcctcgccccattggcacaagatacctgactcgtaatctgtaa

SEQ ID NO: 3458 - DNA, 2208 bp, Artificial Sequence
  source: /note="Description of Artificial Sequence: Synthetic polynucleotide"
atggctgccgatggttatcttccagattggctcgaggacactctctctgaaggaataagacagtggtggaagctcaaacctggcccaccaccgccaaagcccgcagagcggcataaggacgacagcaggggtcttgtgcttcctgggtacaagtacctcggacccttcaacggactcgacaaaggagagccggtcaacgaggcagacgccgcggccctcgagcacgacaaggcctacgaccggcagctcgacagcggagacaacccgtacctcaagtacaaccacgccgacgcggagtttcaggagcgccttaaagaagatacgtcttttgggggcaacctcgcaagagcagtattccaggcgaaaaagagggttcttgaacctctgggcctggttgaggagcctgttaagacggctccgggaaaaaagaggccggtagagcactctcctgcggagctagattcctcctccggaactggaaagtcgggccaacagcctgcaagaaagagattgaattttggtcagactggagacgcagactccgtacctgacccccagcctctcggacagccaccagcagccccctctggtctgggaactaatacgatggcttcaggcagtggcgcaccaatggcagacaataacgagggcgccgacggagtgggtaattcctcgggaaattggcattgcgattccacatggatgggcgacagagtcatcaccaccagcacccgcacctgggctctgcccacctacaacaaccatctgtacaagcaaatttccagccagtctggggccagcaacgacaaccactactttggctacagcaccccttgggggtattttgacttcaacagattccactgccacttctccccacgtgactggcaaagactcatcaacaacaattggggattccggcccaaaagactcaacttcaagctctttaacattcaagtcaaggaggtcacgcagaatgacggtacgacgacgattgccaataaccttaccagcacggttcaggtgtttactgactcggagtaccagctcccgtacgtcctcggctcggcgcatcaaggatgcctcccgccgttcccagcagacgtcttcatggtgccacagtatggatacctcaccctgaacaacgggagtcaggcggtaggacgctcttcattttactgcctggagtactttccttctcagatgctgcgtaccggaaacaactttaccttcagctacacctttgaggacgttccttttcacagcagctacgctcacagccagagtttggaccgtctcatgaatcctctcatcgaccagtacctgtattacttgagcagaacaaacactccaagcggaaccactacgcagtccaggcttcagttttctcaagccggagcgagtgacattcgggaccagtctaggaactggcttcctggaccctgttaccgccagcagcgagtatcaaagacagctgcggacaacaacaacagtgattactcgtggactggagctaccaagtatcacctcaatggaagagactctctggtgaatccgggcacagccatggccagccacaaggacgatgaagaaaagtattttcctcagagcggggttctcatcttcggaaaacgagactcgggaaaaactaatgtggacattgaaaaggtcatgattacagacgaagaggaaatcaggaccaccaatcccgtggctacggagcagtatggttctgtatctaccaatctccagagcggcaacacacaagcagctacctcagatgtcaacacacaaggcgttcttccaggcatggtctggcaggacagagacgtgtacctgcagggacccatctgggcaaagattccacacacggacggacattttcacccttctcctcttatgggaggatttggaccgaagcaccctcccccgcagattctcatcaagaataccccggtacctgcgaatccttctaccaccttcagcgcggcaaagtttgcttccttcatcacacagtactccacggggcaggtcagcgtggagatcgagtgggagctgcagaaagagaacagcaaacgctggaaccccgagatccagtatacctccaactacaacaagtctgttaatgtggactttactgtggacactaatggcgtgtattcagagcctcgccccattggcacaagatacctgactcgtaatctgtaa

SEQ ID NO: 3459 - DNA, 2208 bp, Artificial Sequence
  source: /note="Description of Artificial Sequence: Synthetic polynucleotide"
atggctgccgatggttatcttccagattggctcgaggacactctctctgaaggaataagacagtggtggaagctcaaacctggcccaccaccgccaaagcccgcagagcggcataaggacgacagcaggggtcttgtgcttcctgggtacaagtacctcggacccttcaacggactcgacaaaggagagccggtcaacgaggcagacgccgcggccctcgagcacgacaaggcctacgaccggcagctcgacagcggagacaacccgtacctcaagtacaaccacgccgacgcggagtttcaggagcgccttaaagaagatacgtcttttgggggcaacctcgcaagagcagtattccaggcgaaaaagagggttcttgaacctctgggcctggttgaggagcctgttaagacggctccgggaaaaaagaggccggtagagcactctcctgcggagctagattcctcctccggaactggaaagtcgggccaacagcctgcaagaaagagattgaattttggtcagactggagacgcagactccgtacctgacccccagcctctcggacagccaccagcagccccctctggtctgggaactaatacgatggcttcaggcagtggcgcaccaatggcagacaataacgagggcgccgacggagtgggtaattcctcgggaaattggcattgcgattccacatggatgggcgacagagccatcaccaccagcacccgcacctgggctctgcccacctacaacaaccatctgtacaagcaaatttccagccagtctggggccagcaacgacaaccactactttggctacagcaccccttgggggtattttgacttcaacagattccactgccacttctccccacgtgactggcaaagactcatcaacaacaattggggattccggcccaaaagactcaacttcaagctctttaacattcaagtcaaggaggtcacgcagaatgacggtacgacgacgattgccaataaccttaccagcacggttcaggtgtttactgactcggagtaccagctcccgtacgtcctcggctcggcgcatcaaggatgcctcccgccgttcccagcagacgtcttcatggtgccacagtatggatacctcaccctgaacaacgggagtcaggcggtaggacgctcttcattttactgcctggagtactttccttctcagatgctgcgtaccggaaacaactttaccttcagctacacctttgaggacgttccttttcacagcagctacgctcacagccagagtttggaccgtctcatgaatcctctcatcgaccagtacctgtattacttgagcagaacaaacactccaagcggaaccactacgcagtccaggcttcagttttctcaagccggagcgagtgacattcgggaccagtctaggaactggcttcctggaccctgttaccgccagcagcgagtatcaaagacagctgcggacaacaacaacagtgattactcgtggactggagctaccaagtatcacctcaatggaagagactctctggtgaatccgggcacagccatggccagccacaaggacgatgaagaaaagtattttcctcagagcggggttctcatcttcggaaaacaagactcgggaaaaactaatgtggacattgaaaaggtcatgattacagacgaagaggaaatcaggaccaccaatcccgtggctacggagcagtatggttctgtatctaccaatctccagagcggcaacacacaagcagctacctcagatgtcaacacacaaggcgttcttccaggcatggtctggcaggacagagacgtgtacctgcagggacccatctgggcaaagattccacacacggacggacattttcacccttctcctcttatgggaggatttggaccgaagcaccctcccccgcagattctcatcaagaataccccggtacctgcgaatccttctaccaccttcagcgcggcaaagtttgcttccttcatcacacagtactccacggggcaggtcagcgtggagatcgagtgggagctgcagaaagagaacagcaaacgctggaaccccgagatccagtatacctccaactacaacaagtctgttaatgtggactttactgtggacactaatggcgtgtattcagagcctcgccccattggcacaagatacctgactcgtaatctgtaa

SEQ ID NO: 3460 - DNA, 2208 bp, Artificial Sequence
  source: /note="Description of Artificial Sequence: Synthetic polynucleotide"
atggctgccgatggttatcttccagattggctcgaggacactctctctgaaggaataagacagtggtggaagctcaaacctggcccaccaccgccaaagcccgcagagcggcataaggacgacagcaggggtcttgtgcttcctgggtacaagtacctcggacccttcaacggactcgacaaaggagagccggtcaacgaggcagacgccgcggccctcgagcacgacaaggcctacgaccggcagctcgacagcggagacaacccgtacctcaagtacaaccacgccgacgcggagtttcaggagcgccttaaagaagatacgtcttttgggggcaacctcgcaagagcagtattccaggcgaaaaagagggttcttgaacctctgggcctggttgaggagcctgttaagacggctccgggaaaaaagaggccggtagagcactctcctgcggagctagattcctcctccggaactggaaagtcgggccaacagcctgcaagaaagagattgaattttggtcagactggagacgcagactccgtacctgacccccagcctctcggacagccaccagcagccccctctggtctgggaactaatacgatggcttcaggcagtggcgcaccaatggcagacaataacgagggcgccgacggagtgggtaattcctcgggaaattggcattgcgattccacatggatgggcgacagagtcatcaccaccagcacccgcacctgggctctgcccacctacaacaaccatctgtacaagcaaatttccagccagtctggggccagcaacgacaaccactactttggctacagcaccccttgggggtattttgacttcaacagattccactgccacttctccccacgtgactggcaaagactcatcaacaacaattggggattccggcccaaaagactcaacttcaagctctttaacattcaagtcaaggaggtcacgcagaatgacggtacgacgacgattgccaataaccttaccagcacggttcaggtgtttactgactcggagtaccagctcccgtacgtcctcggctcggcgcatcaaggatgcctcccgccgttcccagcagacgtcttcatggtgccacagtatggatacctcaccctgaacaacgggagtcaggcggtaggacgctcttcattttactgcctggagtactttccttctcagatgctgcgtaccggaaacaactttaccttcagctacacctttgaggacgttccttttcacagcagctacgctcacagccagagtttggaccgtctcatgaatcctctcatcgaccagtacctgtattacttgagcagaacaaacactccaagcggaaccactacgcagtccaggcttcagttttctcaagccggagcgagtgacattcgggaccagtctaggaactggcttcctggaccctgttaccgccagcagcgagtatcaaagacagctgcggacaacaacaacagtgattactcgtggactggagctaccaagtatcacctcaatggaagagactctctggtgaatccgggcacagccatggccagccacaaggacgatgaagaaaagtattttcctcagagcggggttctcatcttcggaaaacaagactcgggaaaaactaatgtggacattgaaaaggtcatgattacagacgaagaggaaatcaggaccaccaatcccgtggctacggagcagtatggttctgtatctaccaatctccagagcggcaacacacaagcagctacctcagatgtcaacacacaaggcgttcttccaggcatggtctggcaggacagagacgtgtacctgcagggacccatctgggcaaagattccacacacggacggacattttcacccttctcctcttatgggaggatttggaccgaagcaccctcccccgcagattctcatcaagaataccccggtacctgcgaatccttctaccaccttcagcgcggcaaagtttgcttacttcatcacacagtactccacggggcaggtcagcgtggagatcgagtgggagctgcagaaagagaacagcaaacgctggaaccccgagatccagtatacctccaactacaacaagtctgttaatgtggactttactgtggacactaatggcgtgtattcagagcctcgccccattggcacaagatacctgactcgtaatctgtaa

SEQ ID NO: 3461 - DNA, 2208 bp, Artificial Sequence
  source: /note="Description of Artificial Sequence: Synthetic polynucleotide"
atggctgccgatggttatcttccagattggctcgaggacactctctctgaaggaataagacagtggtggaagctcaaacctggcccaccaccgccaaagcccgcagagcggcataaggacgacagcaggggtcttgtgcttcctgggtacaagtacctcggacccttcaacggactcgacaaaggagagccggtcaacgaggcagacgccgcggccctcgagcacgacaaggcctacgaccggcagctcgacagcggagacaacccgtacctcaagtacaaccacgccgacgcggagtttcaggagcgccttaaagaagatacgtcttttgggggcaacctcgcaagagcagtattccaggcgaaaaagagggttcttgaacctctgggcctggttgaggagcctgttaagacggctccgggaaaaaagaggccggtagagcactctcctgcggagctagattcctcctccggaactggaaagtcgggccaacagcctgcaagaaagagattgaattttggtcagactggagacgcagactccgtacctgacccccagcctctcggacagccaccagcagccccctctggtctgggaactaatacgatggcttcaggcagtggcgcaccaatggcagacaataacgagggcgccgacggagtgggtaattcctcgggaaattggcattgcgattccacatggatgggcgacagagtcatcaccaccagcacccgcacctgggctctgcccacctacaacaaccatctgtacaagcaaatttccagccagtctggggccagcaacgacaaccactactttggctacagcaccccttgggggtattttggcttcaacagattccactgccacttctccccacgtgactggcaaagactcatcaacaacaattggggattccggcccaaaagactcaacttcaagctctttaacattcaagtcaaggaggtcacgcagaatgacggtacgacgacgattgccaataaccttaccagcacggttcaggtgtttactgactcggagtaccagctcccgtacgtcctcggctcggcgcatcaaggatgcctcccgccgttcccagcagacgtcttcatggtgccacagtatggatacctcaccctgaacaacgggagtcaggcggtaggacgctcttcattttactgcctggagtactttccttctcagatgctgcgtaccggaaacaactttaccttcagctacacctttgaggacgttccttttcacagcagctacgctcacagccagagtttggaccgtctcatgaatcctctcatcgaccagtacctgtattacttgagcagaacaaacactccaagcggaaccactacgcagtccaggcttcagttttctcaagccggagcgagtgacattcgggaccagtctaggaactggcttcctggaccctgttaccgccagcagcgagtatcaaagacagctgcggacaacaacaacagtgattactcgtggactggagctaccaagtatcacctcaatggaagagactctctggtgaatccgggcacagccatggccagccacaaggacgatgaagaaaagtattttcctcagagcggggttctcatcttcggaaaacaagactcgggaaaaactaatgtggacattgaaaaggtcatgattacagacgaagaggaaatcaggaccaccaatcccgtggctacggagcagtatggttctgtatctaccaatctccagagcggcaacacacaagcagctacctcagatgtcaacacacaaggcgttcttccaggcatggtctggcaggacagagacgtgtacctgcagggacccatctgggcaaagattccacacacggacggacattttcacccttctcctcttatgggaggatttggaccgaagcaccctcccccgcagattctcatcaagaataccccggtacctgcgaatccttctaccaccttcagcgcggcaaagtttgcttacttcatcacacagtactccacggggcaggtcagcgtggagatcgagtgggagctgcagaaagagaacagcaaacgctggaaccccgagatccagtatacctccaactacaacaagtctgttaatgtggactttactgtggacactaatggcgtgtattcagagcctcgccccattggcacaagatacctgactcgtaatctgtaa

SEQ ID NO: 3462 - DNA, 2208 bp, Artificial Sequence
  source: /note="Description of Artificial Sequence: Synthetic polynucleotide"
atggctgccgatggttatcttccagattggctcgaggacactctctctgaaggaataagacagtggtggaagctcaaacctggcccaccaccgccaaagcccgcagagcggcataaggacgacagcaggggtcttgtgcttcctgggtacaagtacctcggacccttcaacggactcgacaaaggagagccggtcaacgaggcagacgccgcggccctcgagcacgacaaggcctacgaccggcagctcgacagcggagacaacccgtacctcaagtacaaccacgccgacgcggagtttcaggagcgccttaaagaagatacgtcttttgggggcaacctcgcaagagcagtattccaggcgaaaaagagggttcttgaacctctgggcctggttgaggagcctgttaagacggctccgggaaaaaagaggccggtagagcactctcctgcggagctagattcctcctccggaactggaaagtcgggccaacagcctgcaagaaagagattgaattttggtcagactggagacgcagactccgtacctgacccccagcctctcggacagccaccagcagccccctctggtctgggaactaatacgatggcttcaggcagtggcgcaccaatggcagacaataacgagggcgccgacggagtgggtaattcctcgggaaattggcattgcgattccacatggatgggcgacagagtcatcaccaccagcacccgcacctgggctctgcccacctacaacaaccatctgtacaagcaaatttccagccagtctggggccagcaacgacaaccgctactttggctacagcaccccttgggggtattttgacttcaacagattccactgccacttctccccacgtgactggcaaagactcatcaacaacaattggggattccggcccaaaagactcaacttcaagctctttaacattcaagtcaaggaggtcacgcagaatgacggtacgacgacgattgccaataaccttaccagcacggttcaggtgtttactgactcggagtaccagctcccgtacgtcctcggctcggcgcatcaaggatgcctcccgccgttcccagcagacgtcttcatggtgccacagtatggatacctcaccctgaacaacgggagtcaggcggtaggacgctcttcattttactgcctggagtactttccttctcagatgctgcgtaccggaaacaactttaccttcagctacacctttgaggacgttccttttcacagcagctacgctcacagccagagtttggaccgtctcatgaatcctctcatcgaccagtacctgtattacttgagcagaacaaacactccaagcggaaccactacgcagtccaggcttcagttttctcaagccggagcgagtgacattcgggaccagtctaggaactggcttcctggaccctgttaccgccagcagcgagtatcaaagacagctgcggacaacaacaacagtgattactcgtggactggagctaccaagtatcacctcaatggaagagactctctggtgaatccgggcacagccatggccagccacaaggacgatgaagaaaagtattttcctcagagcggggttctcatcttcggaaaacaagactcgggaaaaactaatgtggacattgaaaaggtcatgattacagacgaagaggaaatcaggaccaccaatcccgtggctacggagcagtatggttctgtatctaccaatctccagagcggcaacacacaagcagctacctcagatgtcaacacacaaggcgttcttccaggcatggtctggcaggacagagacgtgtacctgcagggacccatctgggcaaagattccacacacggacggacattttcacccttctcctcttatgggaggatttggaccgaagcaccctcccccgcagattctcatcaagaataccccggtacctgcgaatccttctaccaccttcagcgcggcaaagtttgcttccttcatcacacagtactccacggggcaggtcagcgtggagatcgagtgggagctgcagaaagagaacagcaaacgctggaaccccgagatccagtatacctccaactacaacaagtctgttaatgtggactttactgtggacactaatggcgtgtattcagagcctcgccccattggcacaagatacctgactcgtaatctgtaa

SEQ ID NO: 3463 - DNA, 2208 bp, Artificial Sequence
  source: /note="Description of Artificial Sequence: Synthetic polynucleotide"
atggctgccgatggttatcttccagattggctcgaggacactctctctgaaggaataagacagtggtggaagctcaaacctggcccaccaccgccaaagcccgcagagcggcataaggacgacagcaggggtcttgtgcttcctgggtacaagtacctcggacccttcaacggactcgacaaaggagagccggtcaacgaggcagacgccgcggccctcgagcacgacaaggcctacgaccggcagctcgacagcggagacaacccgtacctcaagtacaaccacgccgacgcggagtttcaggagcgccttaaagaagatacgccttttgggggcaacctcgcaagagcagtattccaggcgaaaaagagggttcttgaacctctgggcctggttgaggagcctgttaagacggctccgggaaaaaagaggccggtagagcactctcctgcggagctagattcctcctccggaactggaaagtcgggccaacagcctgcaagaaagagattgaattttggtcagactggagacgcagactccgtacctgacccccagcctctcggacagccaccagcagccccctctggtctgggaactaatacgatggcttcaggcagtggcgcaccaatggcagacaataacgagggcgccgacggagtgggtaattcctcgggaaattggcattgcgattccacatggatgggcgacagagtcatcaccaccagcacccgcacctgggctctgcccacctacaacaaccatctgtacaagcaaatttccagccagtctggggccagcaacgacaaccactactttggctacagcaccccttgggggtattttgacttcaacagattccactgccacttctccccacgtgactggcaaagactcatcaacaacaattggggattccggcccaaaagactcaacttcaagctctttaacattcaagtcaaggaggtcacgcagaatgacggtacgacgacgattgccaataaccttaccagcacggttcaggtgtttactgactcggagtaccagctcccgtacgtcctcggctcggcgcatcaaggatgcctcccgccgttcccagcagacgtcttcatggtgccacagtatggatacctcaccctgaacaacgggagtcaggcggtaggacgctcttcattttactgcctggagtactttccttctcagatgctgcgtaccggaaacaactttaccttcagctacacctttgaggacgttccttttcacagcagctacgctcacagccggagtttggaccgtctcatgaatcctctcatcgaccagtacctgtattacttgagcagaacaaacactccaagcggaaccactacgcagtccaggcttcagttttctcaagccggagcgagtgacattcgggaccagtctaggaactggcttcctggaccctgttaccgccagcagcgagtatcaaagacagctgcggacaacaacaacagtgattactcgtggactggagctaccaagtatcacctcaatggaagagactctctggtgaatccgggcacagccatggccagccacaaggacgatgaagaaaagtattttcctcagagcggggttctcatcttcggaaaacaagactcgggaaaaactaatgtggacattgaaaaggtcatgattacagacgaagaggaaatcaggaccaccaatcccgtggctacggagcagtatggttctgtatctaccaatctccagagcggcaacacacaagcagctacctcagatgtcaacacacaaggcgttcttccaggcatggtctggcaggacagagacgtgtacctgcagggacccatctgggcaaagattccacacacggacggacattttcacccttctcctcttatgggaggatttggaccgaagcaccctcccccgcagattctcatcaagaataccccggtacctgcgaatccttctaccaccttcagcgcggcaaagtttgcttccttcatcacacagtactccacggggcaggtcagcgtggagatcgagtgggagctgcagaaagagaacagcaaacgctggaaccccgagatccagtatacctccaactacaacaagtctgttaatgtggactttactgtggacactaatggcgtgtattcagagcctcgccccattggcacaagatacctgactcgtaatctgtaa

SEQ ID NO: 3464 - DNA, 2208 bp, Artificial Sequence
  source: /note="Description of Artificial Sequence: Synthetic polynucleotide"
atggctgccgatggttatcttccagattggctcgaggacactctctctgaaggaataagacagtggtggaagctcaaacctggcccaccaccgccaaagcccgcagagcggcataaggacggcagcaggggtcttgtgcttcctgggtacaagtacctcggacccttcaacggactcgacaaaggagagccggtcaacgaggcagacgccgcggccctcgagcacgacaaggcctacgaccggcagctcgacagcggagacaacccgtacctcaagtacaaccacgccgacgcggagtttcaggagcgccttaaagaagatacgtcttttgggggcaacctcgcaagagcagtattccaggcgaaaaagagggttcttgaacctctgggcctggttgaggagcctgttaagacggctccgggaaaaaagaggccggtagagcactctcctgcggagctagattcctcctccggaactggaaagtcgggccaacagcctgcaagaaagagattgaattttggtcagactggagacgcagactccgtacctgacccccagcctctcggacagccaccagcagccccctctggtctgggaactaatacgatggcttcaggcagtggcgcaccaatggcagacaataacgagggcgccgacggagtgggtaattcctcgggaaattggcattgcgattccacatggatgggcgacagagtcatcaccaccagcacccgcacctgggctctgcccacctacaacaaccatctgtacaagcaaatttccagccagtctggggccagcaacgacaaccactactttggctacagcaccccttgggggtattttgacttcaacagattccactgccacttctccccacgtgactggcaaagactcatcaacaacaattggggattccggcccaaaagactcaacttcaagctctttaacattcaagtcaaggaggtcacgcagaatgacggtacgacgacgattgccaataaccttaccagcacggttcaggtgtttactgactcggagtaccagctcccgtacgtcctcggctcggcgcatcaaggatgcctcccgccgttcccagcagacgtcttcatggtgccacagtatggatacctcaccctgaacaacgggagtcaggcggtaggacgctcttcattttactgcctggagtactttccttctcagatgctgcgtaccggaaacaactttaccttcagctacacctttgaggacgttccttttcacagcagctacgctcacagccagagtttggaccgtctcatgaatcctctcatcgaccagtacctgtattacttgagcagaacaaacactccaagcggaaccactacgcagtccaggcttcagttttctcaagccggagcgagtgacattcgggaccagtctaggaactggcttcctggaccctgttaccgccagcagcgagtatcaaagacagctgcggacaacaacaacagtgattactcgtggactggagctaccaagtatcacctcaatggaagagactctctggtgaatccgggcacagccatggccagccacaaggacgatgaagaaaagtattttcctcagagcggggttctcatcttcggaaaacaagactcgggaaaaactaatgtggacattgaaaaggtcatgattacagacgaagaggaaatcaggaccaccaatcccgtggctacggagcagtatggttctgtatctaccaatctccagagcggcaacacacaagcagctacctcagatgtcaacacacaaggcgttcttccaggcatggtctggcaggacagagacgtgtacctgcagggacccatctgggcaaagattccacacacggacggacattttcacccttctcctcttatgggaggatttggaccgaagcaccctcccccgcagattctcatcaagaataccccggtacctgcgaatccttctaccaccttcagcgcggcaaagtttgcttccttcatcacacagtactccacggggcaggtcagcgtggagatcgagtgggagctgcagaaagagaacagcaaacgctggaaccccgagatccagtatacctccaactacaacaagtctgttaatgtggactttactgtggacactaatggcgtgtattcagagcctcgccccattggcacaagatacctgactcgtaatctgtaa

SEQ ID NO: 3465 - DNA, 2208 bp, Artificial Sequence
  source: /note="Description of Artificial Sequence: Synthetic polynucleotide"
atggctgccgatggttatcttccagattggctcgaggacactctctctgaaggaataagacagtggtggaagctcaaacctggcccaccaccgccaaagcccgcagagcggcataaggacgacagcaggggtcttgtgcttcctgggtacaagtacctcggacccttcaacggactcgacaaaggagagccggtcaacgaggcagacgccgcggccctcgagcacgacaaggcctacgaccggcagctcgacagcggagacaacccgtacctcaagtacaaccacgccgacgcggggtttcaggagcgccttaaagaagatacgtcttttgggggcaacctcgcaagagcagtattccaggcgaaaaagagggttcttgaacctctgggcctggttgaggagcctgttaagacggctccgggaaaaaagaggccggtagagcactctcctgcggagctagattcctcctccggaactggaaagtcgggccaacagcctgcaagaaagagattgaattttggtcagactggagacgcagactccgtacctgacccccagcctctcggacagccaccagcagccccctctggtctgggaactaatacgatggcttcaggcagtggcgcaccaatggcagacaataacgagggcgccgacggagtgggtaattcctcgggaaattggcattgcgattccacatggatgggcgacagagtcatcaccaccagcacccgcacctgggctctgcccacctacaacaaccatctgtacaagcaaatttccagccagtctggggccagcaacgacaaccactactttggctacagcaccccttgggggtattttgacttcaacagattccactgccacttctccccacgtgactggcaaagactcatcaacaacaattggggattccggcccaaaagactcaacttcaagctctttaacattcaagtcaaggaggtcacgcagaatgacggtacgacgacgattgccaataaccttaccagcacggttcaggtgtttactgactcggagtaccagctcccgtacgtcctcggctcggcgcatcaaggatgcctcccgccgttcccagcagacgtcttcatggtgccacagtatggatacctcaccctgaacaacgggagtcaggcggtaggacgctcttcattttactgcctggagtactttccttctcagatgctgcgtaccggaaacaactttaccttcagctacacctttgaggacgttccttttcacagcagctacgctcacagccagagtttggaccgtctcatgaatcctctcatcgaccagtacctgtattacttgagcagaacaaacactccaagcggaaccactacgcagtccaggcttcagttttctcaagccggagcgagtgacattcgggaccagtctaggaactggcttcctggaccctgttaccgccagcagcgagtatcaaagacagctgcggacaacaacaacagtgattactcgtggactggagctaccaagtatcacctcaatggaagagactctctggtgaatccgggcacagccatggccagccacaaggacgatgaagaaaagtattttcctcagagcggggttctcatcttcggaaaacaagactcgggaaaaactaatgtggacattgaaaaggtcatgattacagacgaagaggaaatcaggaccaccaatcccgtggctacggagcagtatggttctgtatctaccaatctccagagcggcaacacacaagcagctacctcagatgtcaacacacaaggcgttcttccaggcatggtctggcaggacagagacgtgtacctgcagggacccatctgggcaaagattccacacacggacggacattttcacccttctcctcttatgggaggatttggaccgaagcaccctcccccgcagattctcatcaagaataccccggtacctgcgaatccttctaccaccttcagcgcggcaaagtttgcttccttcatcacacagtactccacggggcaggtcagcgtggagatcgagtgggagctgcagaaagagaacagcaaacgctggaaccccgagatccagtatacctccaactacaacaagtctgttaatgtggactttactgtggacactaatggcgtgtattcagagcctcgccccattggcacaagatacctgactcgtaatctgtaa

SEQ ID NO: 3466 - DNA, 2208 bp, Artificial Sequence
  source: /note="Description of Artificial Sequence: Synthetic polynucleotide"
atggctgccgatggttatcttccagattggctcgaggacactctctctgaaggaataagacagtggtggaagctcaaacctggcccaccaccgccaaagcccgcagagcggcataaggacgacagcaggggtcttgtgcttcctgggtacaagtacctcggacccttcaacggactcgacaaaggagagccggtcaacgaggcagacgccgcggccctcgagcacgacaaggcctacgaccggcagctcgacagcggagacaacccgtacctcaagtacaaccacgccgacgcggagtttcaggagcgccttaaagaagatacgtcttttgggggcaacctcgcaagagcagtattccaggcgaaaaagagggttcttgaacctctgggcctggttgaggagcctgttaagacggctccgggaaaaaagaggccggtagagcactctcctgcggagctagattcctcctccggaactggaaagtcgggccaacagcctgcaagaaagagattgaattttggtcagactggagacgcagactccgtacctgacccccagcctctcggacagccaccagcagccccctctggtctgggaactaatacgatggcttcaggcagtggcgcaccaatggcagacaataacgagggcgccgacggagtgggtaattcctcgggaaattggcattgcgattccacatggatgggcgacagagtcatcaccaccagcacccgcacctgggctctgcccacctacaacaaccatctgtacaagcaaatttccagccagtctggggccagcaacgacaaccactaccttggctacagcaccccttgggggtattttgacttcaacagattccactgccacttctccccacgtgactggcaaagactcatcaacaacaattggggattccggcccaaaagactcaacttcaagctctttaacattcaagtcaaggaggtcacgcagaatgacggtacgacgacgattgccaataaccttaccagcacggttcaggtgtttactgactcggagtaccagctcccgtacgtcctcggctcggcgcatcaaggatgcctcccgccgttcccagcagacgtcttcatggtgccacagtatggatacctcaccctgaacaacgggagtcaggcggtaggacgctcttcattttactgcctggagtactttccttctcagatgctgcgtaccggaaacaactttaccttcagctacacctttgaggacgttccttttcacagcagctacgctcacagccagagtttggaccgtctcatgaatcctctcatcgaccagtacctgtattacttgagcagaacaaacactccaagcggaaccactacgcagtccaggcttcagttttctcaagccggagcgagtgacattcgggaccagtctaggaactggcttcctggaccctgttaccgccagcagcgagtatcaaagacagctgcggacaacaacaacagtgattactcgtggactggagctaccaagtatcacctcaatggaagagactctctggtgaatccgggcacagccatggccagccacaaggacgatgaagaaaagtattttcctcagagcggggttctcatcttcggaaaacaagactcgggaaaaactaatgtggacattgaaaaggtcatgattacagacgaagaggaaatcaggaccaccaatcccgtggctacggagcagtatggttctgtatctaccaatctccagagcggcaacacacaagcagctacctcagatgtcaacacacaaggcgttcttccaggcatggtctggcaggacagagacgtgtacctgcagggacccatctgggcaaagattccacacacggacggacattttcacccttctcctcttatgggaggatttggaccgaagcaccctcccccgcagattctcatcaagaataccccggtacctgcgaatccttctaccaccttcagcgcggcaaagtttgcttccttcatcacacagtactccacggggcaggtcagcgtggagatcgagcgggagctgcagaaagagaacagcaaacgctggaaccccgagatccagtatacctccaactacaacaagtctgttaatgtggactttactgtggacactaatggcgtgtattcagagcctcgccccattggcacaagatacctgactcgtaatctgtaa

SEQ ID NO: 3467 - DNA, 2208 bp, Artificial Sequence
  source: /note="Description of Artificial Sequence: Synthetic polynucleotide"
atggctgccgatggttatcttccagattggctcgaggacactctctctgaaggaataagacagtggtggaagctcaaacctggcccaccaccgccaaagcccgcagagcggcataaggacgacagcaggggtcttgtgcttcctgggtacaagtacctcggacccttcaacggactcgacaaaggagagccggtcaacgaggcagacgccgcggccctcgagcacgacaaggcctacgaccggcagctcgacagcggagacaacccgtacctcaagtacaaccacgccgacgcggagtttcaggagcgccttaaagaagatacgtcttttgggggcaacctcgcaagagcagtattccaggcgaaaaagagggttcttgaacctctgggcctggttgaggagcctgttaagacggctccgggaaaaaagaggccggtagagcactctcctgcggagctagattcctcctccggaactggaaagtcgggccaacagcctgcaagaaagagattgaattttggtcagactggagacgcagactccgtacctgacccccagcctctcggacagccaccagcagccccctctggtctgggaactaatacgatggcttcaggcagtggcgcaccaatggcagacaataacgagggcgccgacggagtgggtaattcctcgggaaattggcattgcgattccacatggatgggcgacagagtcatcaccaccagcacccgcacctgggctctgcccacctacaacaaccatctgtacaagcaaatttccagccagtctggggccagcaacgacaaccactactttggctacagcaccccttgggggtattttgacttcaacagattccactgccacttctccccacgtgactggcaaagactcatcaacaacaattggggattccggcccaaaagactcaacttcaagctctttaacattcaagtcaaggaggtcacgcagaatgacggtacgacgacgattgccaataaccttaccagcacggttcaggtgtttactgactcggagtaccagctcccgtacgtcctcggctcggcgcatcaaggatgcctcccgccgttcccagcagacgtcttcatggtgccacagtatggatacctcaccctgaacaacgggagtcaggcggtaggacgctcttcattttactgcctggagtactttccttctcagatgctgcgtaccggaaacaactttaccttcagctacacctttgaggacgttccttttcacagcagctacgctcacagccagagtttggaccgtctcatgaatcctctcatcgaccagtacctgtattacttgagcagaacaaacactccaagcggaaccactacgcagtccaggcttcagttttctcaagccggagcgagtgacattcgggaccagtctaggaactggcttcctggaccctgttaccgccagcagcgagtatcaaagacagctgcggacaacaacaacagtgattactcgtggactggagctaccaagtatcacctcaatggaagagactctctggtgaatccgggcacagccatggccagccacaaggacgatgaagaaaagtattttcctcagagcggggttctcatcttcggaaaacaagactcgggaaaagctaatgtggacattgaaaaggtcatgattacagacgaagaggaaatcaggaccaccaatcccgtggctacggagcagtatggttctgtatctaccaatctccagagcggcaacacacaagcagctacctcagatgtcaacacacaaggcgttcttccaggcatggtctggcaggacagagacgtgtacctgcagggacccatctgggcaaagattccacacacggacggacattttcacccttctcctcttatgggaggatttggaccgaagcaccctcccccgcagattctcatcaagaataccccggtacctgcgaatccttctaccaccttcagcgcggcaaagtttgcttccttcatcacacagtactccacggggcaggtcagcgtggagatcgagtgggagctgcagaaagagaacagcaaacgctggaaccccgagatccagtatacctccaactacaacaagtctgttaatgtggactttactgtggacactaatggcgtgtattcagagcctcgccccattggcacaagatacctgactcgtaatctgtaa

SEQ ID NO: 3468 - DNA, 2208 bp, Artificial Sequence
  source: /note="Description of Artificial Sequence: Synthetic polynucleotide"
atggctgccgatggttatcttccagattggctcgaggacactctctctgaaggaataagacagtggtggaagctcaaacctggcccaccaccgccaaagcccgcagagcggcataaggacgacagcaggggtcttgtgcttcctgggtacaagtacctcggacccttcaacggactcgacaaaggagagccggtcaacgaggcagacgccgcggccctcgagcacgacaaggcctacgaccggcagctcgacagcggagacaacccgtacctcaagtacaaccacgccgacgcggagtttcaggagcgccttaaagaagatacgtcttttgggggcaacctcgcaagagcagtattccaggcgaaaaagagggttcttgaacctctgggcctggttgaggagcctgttaagacggctccgggaaaaaagaggccggtagagcactctcctgcggagctagattcctcctccggaactggaaagtcgggccaacagcctgcaagaaagagattgaattttggtcagactggagacgcagactccgtacctgacccccagcctctcggacagccaccagcagccccctctggtctgggaactaatacgatggcttcaggcagtggcgcaccaatggcagacaataacgagggcgccgacggagtgggtaattcctcgggaaattggcattgcgattccacatggatgggcgacagagtcatcaccaccagcacccgcacctgggctctgcccacctacaacaaccatctgtacaagcaaatttccagccagtctggggccagcaacgacaaccactactttggctacagcaccccttgggggtattttgacttcaacagattccactgccacttctccccacgtgactggcaaagactcaccaacaacaattggggattccggcccaaaagactcaacttcaagctctttaacattcaagtcaaggaggtcacgcagaatgacggtacgacgacgattgccaataaccttaccagcacggttcaggtgtttactgactcggagtaccagctcccgtacgtcctcggctcggcgcatcaaggatgcctcccgccgttcccagcagacgtcttcatggtgccacagtatggatacctcaccctgaacaacgggagtcaggcggtaggacgctcttcattttactgcctggagtactttccttctcagatgctgcgtaccggaaacaactttaccttcagctacacctttgaggacgttccttttcacagcagctacgctcacagccagagtttggaccgtctcatgaatcctctcatcgaccagtacctgtattacttgagcagaacaaacactccaagcggaaccactacgcagtccaggcttcagttttctcaagccggagcgagtgacattcgggaccagtctaggaactggcttcctggaccctgttaccgccagcagcgagtatcaaagacagctgcggacaacaacaacagtgattactcgtggactggagctaccaagtatcacctcaatggaagagactctctggtgaatccgggcacagccatggccagccacaaggacgatgaagaaaagtattttcctcagagcggggttctcatcttcggaaaacaagactcgggaaaaactaatgtggacattgaaaaggtcatgattacagacgaagaggaaatcaggaccaccaatcccgtggctacggagcagtatggttctgtatctaccaatctccagagcggcaacacacaagcagctacctcagatgtcaacacacaaggcgttcttccaggcatggtctggcaggacagagacgtgtacctgcagggacccatctgggcaaagattccacacacggacggacattttcacccttctcctcttatgggaggatttggaccgaagcaccctcccccgcagattctcatcaagaataccccggtacctgcgaatccttctaccaccttcagcgcggcaaagtttgcttccttcatcacacagtactccacggggcaggtcagcgtggagatcgagtgggagctgcagaaagagaacagcaaacgctggaaccccgagatccagtatacctccaactacaacaagtctgttaatgtggactttactgtggacactaatggcgtgtattcagagcctcgccccattggcacaagatacctgactcgtaatctgtaa

SEQ ID NO: 3469 - DNA, 2208 bp, Artificial Sequence
  source: /note="Description of Artificial Sequence: Synthetic polynucleotide"
atggctgccgatggttatcttccagattggctcgaggacactctctctgaaggaataagacagtggtggaagctcaaacctggcccaccaccgccaaagcccgcagagcggcataaggacgacagcaggggtcttgtgcttcctgggtacaagtacctcggacccttcaacggactcgacaaaggagagccggtcaacgaggcagacgccgcggccctcgagcacgacaaggcctacgaccggcagctcgacagcggagacaacccgtacctcaagtacaaccacgccgacgcggagtttcaggagcgccttaaagaagatacgtcttttgggggcaacctcgcaagagcagtattccaggcgaaaaagagggttcttgaacctctgggcctggttgaggagcctgttaagacggctccgggaaaaaagaggccggtagagcactctcctgcggagctagattcctcctccggaactggaaagtcgggccaacagcctgcaagaaagagattgaattttggtcagactggagacgcagactccgtacctgacccccagcctctcggacagccaccagcagccccctctggtctgggaactaatacgatggcttcaggcagtggcgcaccaatggcagacaataacgagggcgccgacggagtgggtaattcctcgggaaattggcattgcgattccacatggatgggcgacagagtcatcaccaccagcacccgcacctgggctctgcccacctacaacaaccatctgtacaagcaaatttccagccagtctggggccagcaacgacaaccactactttggctacagcaccccttgggggtattttgacttcaacagattccactgccacttctccccacgtgactggcaaagactcatcaacaacaattggggattccggcccaaaagactcaacttcaagctctttaacattcaagtcaaggaggtcacgcagaatgacggtacgacgacgattgccaataaccttaccagcacggttcgggtgtttactgactcggagtaccagctcccgtacgtcctcggctcggcgcatcaaggatgcctcccgccgttcccagcagacgtcttcatggtgccacagtatggatacctcaccctgaacaacgggagtcaggcggtaggacgctcttcattttactgcctggagtactttccttctcagatgctgcgtaccggaaacaactttaccttcagctacacctttgaggacgttccttttcacagcagctacgctcacagccagagtttggaccgtctcatgaatcctctcatcgaccagtacctgtattacttgagcagaacaaacactccaagcggaaccactacgcagtccaggcttcagttttctcaagccggagcgagtgacattcgggaccagtctaggaactggcttcctggaccctgttaccgccagcagcgagtatcaaagacagctgcggacaacaacaacagtgattactcgtggactggagctaccaagtatcacctcaatggaagagactctctggtgaatccgggcacagccatggccagccacaaggacgatgaagaaaagtattttcctcagagcggggttctcatcttcggaaaacaagactcgggaaaaactaatgtggacattgaaaaggtcatgattacagacgaagaggaaatcaggaccaccaatcccgtggctacggagcagtatggttctgtatctaccaatctccagagcggcaacacacaagcagctacctcagatgtcaacacacaaggcgttcttccaggcatggtctggcaggacagagacgtgtacctgcagggacccatctgggcaaagattccacacacggacggacattttcacccttctcctcttatgggaggatttggaccgaagcaccctcccccgcagattctcatcaagaataccccggtacctgcgaatccttctaccaccttcagcgcggcaaagtttgcttccttcatcacacagtactccacggggcaggtcagcgtggagatcgagtgggagctgcagaaagagaacagcaaacgctggaaccccgagatccagtatacctccaactacaacaagtctgttaatgtggactttactgtggacactaatggcgtgtattcagagcctcgccccattggcacaagatacctgactcgtaatctgtaa

SEQ ID NO: 3470 - DNA, 2208 bp, Artificial Sequence
  source: /note="Description of Artificial Sequence: Synthetic polynucleotide"
atggctgccgatggttatcttccagattggctcgaggacactctctctgaaggaataagacagtggtggaagctcaaacctggcccaccaccgccaaagcccgcagagcggcataaggacgacagcaggggtcttgtgcttcctgggtacaagtacctcggacccttcaacggactcgacaaaggagagccggtcaacgaggcagacgccgcggccctcgagcacgacaaggcctacgaccggcagctcgacagcggagacaacccgtacctcaagtacaaccacgccgacgcggagtttcaggagcgccttaaagaagatacgtcttttgggggcaacctcgcaagagcagtattccaggcgaaaaagagggttcttgaacctctgggcctggttggggagcctgttaagacggctccgggaaaaaagaggccggtagagcactctcctgcggagctagattcctcctccggaactggaaagtcgggccaacagcctgcaagaaagagattgaattttggtcagactggagacgcagactccgtacctgacccccagcctctcggacagccaccagcagccccctctggtctgggaactaatacgatggcttcaggcagtggcgcaccaatggcagacaataacgagggcgccgacggagtgggtaattcctcgggaaattggcattgcgattccacatggatgggcgacagagtcatcaccaccagcacccgcacctgggctctgcccacctacaacaaccatctgtacaagcaaatttccagccagtctggggccagcaacgacaaccactactttggctacagcaccccttgggggtattttgacttcaacagattccactgccacttctccccacgtgactggcaaagactcatcaacaacaattggggattccggcccaaaagactcaacttcaagctctttaacattcaagtcaaggaggtcacgcagaatgacggtacgacgacgattgccaataaccttaccagcacggttcaggtgtttactgactcggagtaccagctcccgtacgtcctcggctcggcgcatcaaggatgcctcccgccgttcccagcagacgtcttcatggtgccacagtatggatacctcaccctgaacaacgggagtcaggcggtaggacgctcttcattttactgcctggagtactttccttctcagatgctgcgtaccggaaacaactttaccttcagctacacctttgaggacgttccttttcacagcagctacgctcacagccagagtttggaccgtctcatgaatcctctcatcgaccagtacctgtattacttgagcagaacaaacactccaagcggaaccactacgcagtccaggcttcagttttctcaagccggagcgagtgacattcgggaccagtctaggaactggcttcctggaccctgttaccgccagcagcgagtatcaaagacagctgcggacaacaacaacagtgattactcgtggactggagctaccaagtatcacctcaatggaagagactctctggtgaatccgggcacagccatggccagccacaaggacgatgaagaaaagtattttcctcagagcggggttctcatcttcggaaaacaagactcgggaaaaactaatgtggacattgaaaaggtcatgattacagacgaagaggaaatcaggaccaccaatcccgtggctacggagcagtatggttctgtatctaccaatctccagagcggcaacacacaagcagctacctcagatgtcaacacacaaggcgttcttccaggcatggtctggcaggacagagacgtgtacctgcagggacccatctgggcaaagattccacacacggacggacattttcacccttctcctcttatgggaggatttggaccgaagcaccctcccccgcagattctcatcaagaataccccggtacctgcgaatccttctaccaccttcagcgcggcaaagtttgcttccttcatcacacagtactccacggggcaggtcagcgtggagatcgagtgggagctgcagaaagagaacagcaaacgctggaaccccgagatccagtatacctccaactacaacaagtctgttaatgtggactttactgtggacactaatggcgtgtattcagagcctcgccccattggcacaagatacctgactcgtaatctgtaa

SEQ ID NO: 3471 - DNA, 2208 bp, Artificial Sequence
  source: /note="Description of Artificial Sequence: Synthetic polynucleotide"
atggctgccgatggttatcttccagattggctcgaggacactctctctgaaggaataagacagtggtggaagctcaaacctggcccaccaccgccaaagcccgcagagcggcataaggacgacagcaggggtcttgtgcttcctgggtacaagtacctcggacccttcaacggactcgacaaaggagagccggtcaacgaggcagacgccgcggccctcgagcacgacaaggcctacgaccggcagctcgacagcggagacaacccgtacctcaagtacaaccacgccgacgcggagtttcaggagcgccttaaagaagatacgtcttttgggggcaacctcgcaagagcagtattccaggcgaaaaagagggttcttgaacctctgggcctggttgaggagcctgttaagacggctccgggaaaaaagaggccggtagagcactctcctgcggagctagattcctcctccggaactggaaagtcgggccaacagcctgcaagaaagagattgaattttggtcagactggagacgcagactccgtacctggcccccagcctctcggacagccaccagcagccccctctggtccgggaactaatacgatggcttcaggcagtggcgcaccaatggcagacaataacgagggcgccgacggagtgggtaattcctcgggaaattggcattgcgattccacatggatgggcgacagagtcgtcaccaccagcacccgcacctgggctctgcccacctacaacaaccatctgtacaagcaaatttccagccagtctggggccagcaacgacaaccactactttggctacagcaccccttgggggtattttgacttcaacagattccactgccacttctccccacgtgactggcaaagactcatcaacaacaattggggattccggcccaaaagactcaacttcaagctctttaacattcaagtcaaggaggtcacgcagaatgacggtacgacgacgattgccaataaccttaccagcacggttcaggtgtttactgactcggagtaccagctcccgtacgtcctcggctcggcgcatcaaggatgcctcccgccgttcccagcagacgtcttcatggtgccacagtatggatacctcaccctgaacaacgggagtcaggcggtaggacgctcttcattttactgcctggagtactttccttctcagatgctgcgtaccggaaacaactttaccttcagctacacctttgaggacgttccttttcacagcagctacgctcacagccagagtttggaccgtctcatgaatcctctcatcgaccagtacctgtattacttgagcagaacaaacactccaagcggaaccactacgcagtccaggcttcagttttctcaagccggagcgagtgacattcgggaccagtctaggaactggcttcctggaccctgttaccgccagcagcgagtaccaaagacagctgcggacaacaacaacagtgattactcgtggactggagctaccaagtatcacctcaatggaagagactctctggtgaatccgggcacagccatggccagccacaaggacgatgaagaaaagtattttcctcagagcggggttctcatcttcggaaaacaagactcgggaaaaactaatgtggacattgaaaaggtcatgattacagacgaagaggaaatcaggaccaccaatcccgtggctacggagcagtatggttctgtatctaccaatctccagagcggcaacacacaagcagctacctcagatgtcaacacacaaggcgttcttccaggcatggtctggcaggacagagacgtgtacctgcagggacccatctgggcaaagattccacacacggacggacattttcacccttctcctcttatgggaggatttggaccgaagcaccctcccccgcagattctcatcaagaataccccggtacctgcgaatccttctaccaccttcagcgcggcaaagtttgcttccttcatcacacagtactccacggggcaggtcagcgtggagatcgagtgggagctgcagaaagagaacagcaaacgctggaaccccgagatccagtatacctccaactacaacaagtctgttaatgtggactttactgtggacactaatggcgtgtattcagagcctcgccccattggcacaagatacctgactcgtaatctgtaa

SEQ ID NO: 3472 - DNA, 2208 bp, Artificial Sequence
  source: /note="Description of Artificial Sequence: Synthetic polynucleotide"
atggctgccgatggttatcttccagattggctcgaggacactctctctgaaggaataagacagtggtggaagctcaaacctggcccaccaccgccaaagcccgcagagcggcataaggacgacagcaggggtcttgtgcttcctgggtacaagtacctcggacccttcaacggactcgacaaaggagagccggtcaacgaggcagacgccgcggccctcgagcacgacaaggcctacgaccggcagctcgacagcggagacaacccgtacctcaagtacaaccacgccgacgcggagtttcaggagcgccttaaagaagatacgtcttttgggggcaacctcgcaagagcagtattccaggcgaaaaagagggttcttgaacctctgggcctggttgaggggcctgttaagacggctccgggaaaaaagaggccggtagagcactctcctgcggagctagattcctcctccggaactggaaagtcgggccaacagcctgcaagaaagagattgaattttggtcagactggagacgcagactccgtacctgacccccagcctctcggacagccaccagcagccccctctggtctgggaactaatacgatggcttcaggcagtggcgcaccaatggcagacaataacgagggcgccgacggagtgggtaattcctcgggaaattggcattgcgattccacatggatgggcgacagagtcatcaccaccagcacccgcacctgggctctgcccacctacaacaaccatctgtacaagcaaatttccagccagtctggggccagcaacgacaaccactactttggctacagcaccccttgggggtattttgacttcaacagattccactgccacttctccccacgtgactggcaaagactcatcaacaacaattggggattccggcccaaaagactcaacttcaagctctttaacattcaagtcaaggaggtcacgcagaatgacggtacgacgacgattgccaataaccttaccagcacggttcaggtgtttactgactcggagtaccagctcccgtacgtcctcggctcggcgcatcaaggatgcctcccgccgttcccagcagacgtcttcatggtgccacagtatggatacctcaccctgaacaacgggagtcaggcggtaggacgctcttcattttactgcctggagtactttccttctcagatgctgcgtaccggaaacaactttaccttcagctacacctttgaggacgttccttttcacagcagctacgctcacagccagagtttggaccgtctcatgaatcctctcatcgaccagtacctgtattacttgagcagaacaaacactccaagcggaaccactacgcagtccaggcttcagttttctcaagccggagcgagtgacattcgggaccagtctaggaactggcttcctggaccctgttaccgccagcagcgagtatcaaagacagctgcggacaacaacaacagtgattactcgtggactggagctaccaagtatcacctcaatggaagagactctctggtgaatccgggcacagccatggccagccacaaggacgatgaagaaaagtattttcctcagagcggggttctcatcttcggaaaacaagactcgggaaaaactaatgtggacattgaaaaggtcatgattacagacgaagaggaaatcaggaccaccaatcccgtggctacggagcagtatggttctgtatctaccaatctccagagcggcaacacacaagcagctacctcagatgtcaacacacaaggcgttcttccaggcatggtctggcaggacagagacgtgtacctgcagggacccatctgggcaaagattccacacacggacggacattttcacccttctcctcttatgggaggatttggaccgaagcaccctcccccgcagattctcatcaagaataccccggtacctgcgaatccttctaccaccttcagcgcggcaaagtttgcttccttcatcacacagtactccacggggcaggtcagcgtggagatcgagtgggagctgcagaaagagaacagcaaacgctggaaccccgagatccagtatacctccaactacaacaagtctgttaatgtggactttactgtggacactaatggcgtgtattcagagcctcgccccattggcacaagatacctgactcgtaatctgtaa

SEQ ID NO: 3473 - DNA, 2208 bp, Artificial Sequence
  source: /note="Description of Artificial Sequence: Synthetic polynucleotide"
atggctgccgatggttatcttccagattggctcgaggacactctctctgaaggaataagacagtggtggaagctcaaacctggcccaccaccgccaaagcccgcagagcggcataaggacgacagcaggggtcttgtgcttcctgggtacaagtacctcggacccttcaacggactcgacaaaggagagccggtcaacgaggcagacgccgcggccctcgagcacgacaaggcctacgaccggcagctcgacagcggagacaacccgtacctcaagtacaaccacgccgacgcggagtttcaggagcgccttaaagaagatacgtcttttgggggcaacctcgcaagagcagtattccaggcgaaaaagagggttcttgaacctctgggcctggttgaggagcctgttaagacggctccgggaaaaaagaggccggtagagcactctcctgcggagctagattcctcctccggaactggaaagtcgggccaacagcctgcaagaaagagattgaattttggtcagactggagacgcagactccgtacctgacccccagcctctcggacagccaccagcagccccctctggtctgggaactaatacgatggcttcaggcagtggcgcaccaatggcagacaataacgagggcgccgacggggtgggtaattcctcgggaaattggcattgcgattccacatggatgggcgacagagtcatcaccaccagcacccgcacctgggctctgcccacctacaacaaccatctgtacaagcaaatttccagccagtctggggccagcaacgacaaccactaccttggctacagcaccccttgggggtattttgacttcaacagattccactgccacttctccccacgtgactggcaaagactcatcaacaacaattggggattccggcccaaaagactcaacttcaagctctttaacattcaagtcaaggaggtcacgcagaatgacggtacgacgacgattgccaataaccttaccagcacggttcaggtgtttactgactcggagtaccagctcccgtacgtcctcggctcggcgcatcaaggatgcctcccgccgttcccagcagacgtcttcatggtgccacagtatggatacctcaccctgaacaacgggagtcaggcggtaggacgctcttcattttactgcctggagtactttccttctcagatgctgcgtaccggaaacaactttaccttcagctacacctttgaggacgttccttttcacagcagctacgctcacagccagagtttggaccgtctcatgaatcctctcatcgaccagtacctgtattacttgagcagaacaaacactccaagcggaaccactacgcagtccaggcttcagttttctcaagccggagcgagtgacattcgggaccagtctaggaactggcttcctggaccctgttaccgccagcagcgagtatcaaagacagctgcggacaacaacaacagtgattactcgtggactggagctaccaagtatcacctcaatggaagagactctctggtgaatccgggcacagccatggccagccacaaggacgatgaagaaaagtattttcctcagagcggggttctcatcttcggaaaacaagactcgggaaaaactaatgtggacattgaaaaggtcatgattacagacgaagaggaaatcaggaccaccaatcccgtggctacggagcagtatggttctgtatctaccaatctccagagcggcaacacacaagcagctacctcagatgtcaacacacaaggcgttcttccaggcatggtctggcaggacagagacgtgtacctgcagggacccatctgggcaaagattccacacacggacggacattttcacccttctcctcttatgggaggatttggaccgaagcaccctcccccgcagattctcatcaagaataccccggtacctgcgaatccttctaccaccttcagcgcggcaaagtttgcttccttcatcacacagtactccacggggcaggtcagcgtggagatcgagtgggagctgcagaaagagaacagcaaacgctggaaccccgagatccagtatacctccaactacaacaagtctgttaatgtggactttactgtggacactaatggcgtgtattcagagcctcgccccattggcacaagatacctgactcgtaatctgtaa

SEQ ID NO: 3474 - DNA, 2208 bp, Artificial Sequence
  source: /note="Description of Artificial Sequence: Synthetic polynucleotide"
atggctgccgatggttatcttccagattggctcgaggacactctctctgaaggaataagacagtggtggaagctcaaacctggcccaccaccgccaaagcccgcagagcggcataaggacgacagcaggggtcttgtgcttcctgggtacaagtacctcggacccttcaacggactcgacaaaggagagccggtcaacgaggcagacgccgcggccctcgagcacgacaaggcctacgaccggcagctcgacagcggagacaacccgtacctcaagtacaaccacgccgacgcggagtttcaggagcgccttaaagaagatacgtcttttgggggcaacctcgcaagagcagtattccaggcgaaaaagagggttcttgaacctctgggcctggttgaggagcctgttaagacggctccgggaaaaaaggggccggtagagcactctcctgcggagctagattcctcctccggaactggaaagtcgggccaacagcctgcaagaaagagattgaattttggtcagactggagacgcagactccgtacctgacccccagcctctcggacagccaccagcagccccctctggtctgggaactaatacgatggcttcaggcagtggcgcaccaatggcagacaataacgagggcgccgacggagtgggtaattcctcgggaaattggcattgcgattccacatggatgggcgacagagtcatcaccaccagcacccgcacctgggctctgcccacctacaacaaccatctgtacaagcaaatttccagccagtctggggccagcaacgacaaccactactttggctacagcaccccttgggggtattttgacttcaacagattccactgccacttctccccacgtgactggcaaagactcatcaacaacaattggggattccggcccaaaagactcaacttcaagctctttaacattcaagtcaaggaggtcacgcagaatgacggtacgacgacgattgccaataaccttaccagcacggttcaggtgtttactgactcggagtaccagctcccgtacgtcctcggctcggcgcatcaaggatgcctcccgccgttcccagcagacgtcttcatggtgccacagtatggatacctcaccctgaacaacgggagtcaggcggtaggacgctcttcattttactgcctggagtactttccttctcagatgctgcgtaccggaaacaactttaccttcagctacacctttgaggacgttccttttcacagcagctacgctcacagccagagtttggaccgtctcatgaatcctctcatcgaccagtacctgtattacttgagcagaacaaacactccaagcggaaccactacgcagtccaggcttcagttttctcaagccggagcgagtgacattcgggaccagtctaggaactggcttcctggaccctgttaccgccagcagcgagtatcaaagacagctgcggacaacaacaacagtgattactcgtggactggagctaccaagtatcacctcaatggaagagactctctggtgaatccgggcacagccatggccagccacaaggacgatgaagaaaagtattttcctcagagcggggttctcatcttcggaaaacaagactcgggaaaaactaatgtggacattgaaaaggtcatgattacagacgaagaggaaatcaggaccaccaatcccgtggctacggagcagtatggttctgtatctaccaatctccagagcggcaacacacaagcagctacctcagatgtcaacacacaaggcgttcttccaggcatggtctggcaggacagagacgtgtacctgcagggacccatctgggcaaagattccacacacggacggacattttcacccttctcctcttatgggaggatttggaccgaagcaccctcccccgcagattctcatcaagaataccccggtacctgcgaatccttctaccaccttcagcgcggcaaagtttgcttccttcatcacacagtactccacggggcaggtcagcgtggagatcgagtgggagctgcagaaagagaacagcaaacgctggaaccccgagatccagtatacctccaactacaacaagtctgttaatgtggactttactgtggacactaatggcgtgtattcagagcctcgccccattggcacaagatacctgactcgtaatctgtaa

SEQ ID NO: 3475 - DNA, 2208 bp, Artificial Sequence
  source: /note="Description of Artificial Sequence: Synthetic polynucleotide"
atggctgccgatggttatcttccagattggctcgaggacactctctctgaaggaataagacagtggtggaagctcaaacctggcccaccaccgccaaagcccgcagagcggcataaggacgacagcaggggtcttgtgcttcctgggtacaagtacctcggacccttcaacggactcgacaaaggagagccggtcaacgaggcagacgccgcggccctcgagcacgacaaggcctacgaccggcagctcgacagcggagacaacccgtacctcaagtacaaccacgccgacgcggagtttcaggagcgccttaaagaagatacgccttttgggggcaacctcgcaagagcagtattccaggcgaaaaagagggttcttgaacctctgggcctggttgaggagcctgttaagacggctccgggaaaaaagaggccggtagagcactctcctgcggagctagattcctcctccggaactggaaagtcgggccaacagcctgcaagaaagagattgaattttggtcagactggagacgcagactccgtacctgacccccagcctctcggacagccaccagcagccccctctggtctgggaactaatacgatggcttcaggcagtggcgcaccaatggcagacaataacgagggcgccgacggagtgggtaattcctcgggaaattggcattgcgattccacatggatgggcgacagagtcatcaccaccagcacccgcacctgggctctgcccacctacaacaaccatctgtacaagcaaatttccagccagtctggggccagcaacgacaaccactactttggctacagcaccccttgggggtattttgacttcaacagattccactgccacttctccccacgtgactggcaaagactcatcaacaacaattggggattccggcccaaaagactcaacttcaagctctttaacattcaagtcaaggaggtcacgcagaatgacggtacgacgacgattgccaataaccttaccagcacggttcaggtgtttactgactcggagtaccagctcccgtacgtcctcggctcggcgcatcaaggatgcctcccgccgttcccagcagacgtcttcatggtgccacagtatggatacctcaccctgaacaacgggagtcaggcggtaggacgctcttcattttactgcctggagtactttccttctcagatgctgcgtaccggaaacaactttaccttcagctacacctttgaggacgttccttttcacagcagctacgctcacagccagagtttggaccgtctcatgaatcctctcatcgaccagtacctgtattacttgagcagagcaaacactccaagcggaaccactacgcagtccaggcttcagttttctcaagccggagcgagtgacattcgggaccagtctaggaactggcttcctggaccctgttaccgccagcagcgagtatcaaagacagctgcggacaacaacaacagtgattactcgtggactggagctaccaagtatcacctcaatggaagagactctctggtgaatccgggcacagccatggccagccacaaggacgatgaagaaaagtattttcctcagagcggggttctcatcttcggaaaacaagactcgggaaaaactaatgtggacattgaaaaggtcatgattacagacgaagaggaaatcaggaccaccaatcccgtggctacggagcagtatggttctgtatctaccaatctccagagcggcaacacacaagcagctacctcagatgtcaacacacaaggcgttcttccaggcatggtctggcaggacagagacgtgtacctgcagggacccatctgggcaaagattccacacacggacggacattttcacccttctcctcttatgggaggatttggaccgaagcaccctcccccgcagattctcatcaagaataccccggtacctgcgaatccttctaccaccttcagcgcggcaaagtttgcttccttcatcacacagtactccacggggcaggtcagcgtggagatcgagtgggagctgcagaaagagaacagcaaacgctggaaccccgagatccagtatacctccaactacaacaagtctgttaatgtggactttactgtggacactaatggcgtgtattcagagcctcgccccattggcacaagatacctgactcgtaatctgtaa

SEQ ID NO: 3476 - DNA, 2208 bp, Artificial Sequence
  source: /note="Description of Artificial Sequence: Synthetic polynucleotide"
atggctgccgatggttatcttccagattggctcgaggacactctctctgaaggaataagacagtggtggaagctcaaacctggcccaccaccgccaaagcccgcagagcggcataaggacgacagcaggggtcttgtgcttcctgggtacaagtacctcggacccttcaacggactcgacaaaggagagccggtcaacgaggcagacgccgcggccctcgagcacgacaaggcctacgaccggcagctcgacagcggagacaacccgtacctcaagtacaaccacgccgacgcggagtttcaggagcgccttaaagaagatacgtcttttgggggcaacctcgcaagagcagtattccaggcgaaaaagagggttcttgaacctctgggcctggttgaggagcctgttaagacggctccgggaaaaaagaggccggtagagcactctcctgcggagctagattcctcctccggaactggaaagtcgggccaacagcctgcaagaaagagattgaattttggtcagactggagacgcagactccgtacctgacccccagcctctcggacagccaccagcagccccctctggtctgggaactaatacgatggcttcaggcagtggcgcaccaatggcagacaataacgagggcgccgacggagtgggtaattcctcgggaaattggcattgcgattccacatggatgggcgacagagtcatcaccaccagcacccgcacctgggctctgcccacctacaacaaccatctgtacaagcaaatttccagccagtctggggccagcaacgacaaccactactttggctacagcgccccttgggggtattttgacttcaacagattccactgccacttctccccacgtgactggcaaagactcatcaacaacaattggggattccggcccaaaagactcaacttcaagctctttaacattcaagtcaaggaggtcacgcagaatgacggtacgacgacgattgccaataaccttaccagcacggttcaggtgtttactgactcggagtaccagctcccgtacgtcctcggctcggcgcatcaaggatgcctcccgccgttcccagcagacgtcttcatggtgccacagtatggatacctcaccctgaacaacgggagtcaggcggtaggacgctcttcattttactgcctggagtactttccttctcagatgctgcgtaccggaaacaactttaccttcagctacacctttgaggacgttccttttcacagcagctacgctcacagccagagtttggaccgtctcatgaatcctctcatcgaccagtacctgtattacttgagcagaacaaacactccaagcggaaccactacgcagtccaggcttcagttttctcaagccggagcgagtgacattcgggaccagtctaggaactggcttcctggaccctgttaccgccagcagcgagtatcaaagacagctgcggacaacaacaacagtgattactcgtggactggagctaccaagtatcacctcaatggaagagactctctggtgaatccgggcacagccatggccagccacaaggacgatgaagaaaagtattttcctcagagcggggttctcatcttcggaaaacaagactcgggaaaaactaatgtggacattgaaaaggtcatgattacagacgaagaggaaatcaggaccaccaatcccgtggctacggagcagtatggttctgtatctaccaatctccagagcggcaacacacaagcagctacctcagatgtcaacacacaaggcgttcttccaggcatggtctggcaggacagagacgtgtacctgcagggacccatctgggcaaagattccacacacggacggacattttcacccttctcctcttatgggaggatttggaccgaagcaccctcccccgcagattctcatcaagaataccccggtacctgcgaatccttctaccaccttcagcgcggcaaagtttgcttccttcatcacacagtactccacggggcaggtcagcgtggagatcgagtgggagctgcagaaagagaacagcaaacgctggaaccccgagatccagtatacctccaactacaacaagtctgttaatgtggactttactgtggacactaatggcgtgtattcagagcctcgccccattggcacaagatacctgactcgtaatctgtaa

SEQ ID NO: 3477 - DNA, 2208 bp, Artificial Sequence
  source: /note="Description of Artificial Sequence: Synthetic polynucleotide"
atggctgccgatggttatcttccagattggctcgaggacactctctctgaaggaataagacagtggtggaagctcaaacctggcccaccaccgccaaagcccgcagagcggcataaggacgacagcaggggtcttgtgcttcctgggtacaagtacctcggacccttcaacggactcgacaaaggagagccggtcaacgaggcagacgccgcggccctcgagcacgacaaggcctacgaccggcagctcgacagcggagacaacccgtacctcaagtacaaccacgccgacgcggagtttcaggagcgccttaaagaagatacgtcttttgggggcaacctcgcaagagcagtattccaggcgaaaaagagggttcttgaacctctgggcctggttgaggagcctgttaagacggctccgggaaaaaagaggccggtagagcactctcctgcggagctagattcctcctccggaactggaaagtcgggccaacagcctgcaagaaagagattgaattttggtcagactggagacgcagactccgtacctgacccccagcctctcggacagccaccagcagccccctctggtctgggaactaatacgatggcttcaggcagtggcgcaccaatggcagacaataacgagggcgccgacggagtgggtaattcctcgggaaattggcattgcgattccacatggatgggcgacagagtcatcaccaccagcacccgcacctgggctctgcccacctacaacaaccatctgtacaagcaaatttccagccagtctggggccagcaacgacaaccactactttggctacagcaccccttgggggtattttgacttcaacagattccactgccacttctccccacgtgactggcaaagactcatcaacaacaattggggattccggcccaaaagactcaacttcaagctctttaacattcaagtcaaggaggtcacgcagaatgacggtacgacgacgattgccaataaccttaccagcacggttcaggtgtttactgactcggagtaccagctcccgtacgtcctcggctcggcgcatcaaggatgcctcccgccgttcccagcagacgtcttcatggtgccacagtatggatacctcaccctgaacaacgggagtcaggcggtaggacgctcttcattttactgcctggagtactttccttctcagatgctgcgtaccggaaacaactttaccttcagctacacctttgaggacgttccttttcacagcagctacgctcacagccagagtttggaccgtctcatgaatcctctcatcgaccagtacctgtattacttgagcagaacaaacactccaagcggaaccactacgcagtccaggcttcagttttctcaagccggagcgagtgacattcgggaccagtctaggaactggcttcctggaccctgttaccgccagcagcgagtatcaaagacagctgcggacaacaacaacagtgattactcgtggactggagctaccaagtatcacctcaatggaagagactctctggtgaatccgggcacagccatggccagccacaaggacgatgaagaaaagtattttcctcagagcggggttctcatcttcggaaaacaagactcgggaaaaactaatgtggacattgaaaaggtcatgattacagacgaagaggaaatcaggaccaccaatcccgtggctacggagcagtatggttctgtatctaccaatctccagagcggcaacacacaagcagctacctcagatgtcaacacacaaggcgttcttccaggcatggtctggcaggacagagacgtgtacctgcagggacccatctgggcaaagattccacacacggacggacattttcacccttctcctcttatgggaggatttggaccgaagcaccctcccccgcagattctcatcaagaataccccggtacctgcgaatccttctaccaccttcagcgcggcaaagtttgcttccctcatcacacagtactccacggggcaggtcagcgtggagatcgagtgggagctgcagaaagagaacagcaaacgctggaaccccgagatccagtatacctccaactacaacaagtctgttaatgtggactttactgtggacactaatggcgtgtattcagagcctcgccccattggcacaagatacctgactcgtaatctgtaa

SEQ ID NO: 3478 - DNA, 2208 bp, Artificial Sequence
  source: /note="Description of Artificial Sequence: Synthetic polynucleotide"
atggctgccgatggttatcttccagattggctcgaggacactctctctgaaggaataagacagtggtggaagctcaaacctggcccaccaccgccaaagcccgcagagcggcataaggacgacagcaggggtcttgtgcttcctgggtacaagtacctcggacccttcaacggactcgacaaaggagagccggtcaacgaggcagacgccgcggccctcgagcacgacaaggcctacgaccggcagctcgacagcggagacaacccgtacctcaagtacaaccacgccgacgcggagtttcaggagcgccttaaagaagatacgtcttttgggggcaacctcgcaagagcagtattccaggcgaaaaagagggttcttgaacctctgggcctggttgaggagcctgttaagacggctccgggaaaaaagaggccggtagagcactctcctgcggagctagattcctcctccggaactggaaagtcgggccaacagcctgcaagaaagggattgaattttggtcagactggagacgcagactccgtacctgacccccagcctctcggacagccaccagcagccccctctggtctgggaactaatacgatggcttcaggcagtggcgcaccaatggcagacaataacgagggcgccgacggagtgggtaattcctcgggaaattggcattgcgattccacatggatgggcgacagagtcatcaccaccagcacccgcacctgggctctgcccacctacaacaaccatctgtacaagcaaatttccagccagtctggggccagcaacgacaaccactactttggctacagcaccccttgggggtattttgacttcaacagattccactgccacttctccccacgtgactggcaaagactcatcaacaacaattggggattccggcccaaaagactcaacttcaagctctttaacattcaagtcaaggaggtcacgcagaatgacggtacgacgacgattgccaataaccttaccagcacggttcaggtgtttactgactcggagtaccagctcccgtacgtcctcggctcggcgcatcaaggatgcctcccgccgttcccagcagacgtcttcatggtgccacagtatggatacctcaccctgaacaacgggagtcaggcggtaggacgctcttcattttactgcctggagtactttccttctcagatgctgcgtaccggaaacaactttaccttcagctacacctttgaggacgttccttttcacagcagctacgctcacagccagagtttggaccgtctcatgaatcctctcatcgaccagtacctgtattacttgagcagaacaaacactccaagcggaaccactacgcagtccaggcttcagttttctcaagccggagcgagtgacattcgggaccagtctaggaactggcttcctggaccctgttaccgccagcagcgagtatcaaagacagctgcggacaacaacaacagtgattactcgtggactggagctaccaagtatcacctcaatggaagagactctctggtgaatccgggcacagccatggccagccacaaggacgatgaagaaaagtattttcctcagagcggggttctcatcttcggaaaacaagactcgggaaaaactaatgtggacattgaaaaggtcatgattacagacgaagaggaaatcaggaccaccaatcccgtggctacggagcagtatggttctgtatctaccaatctccagagcggcaacacacaagcagctacctcagatgtcaacacacaaggcgttcttccaggcatggtctggcaggacagagacgtgtacctgcagggacccatctgggcaaagattccacacacggacggacattttcacccttctcctcttatgggaggatttggaccgaagcaccctcccccgcagattctcatcaagaataccccggtacctgcgaatccttctaccaccttcagcgcggcaaagtttgcttccttcatcacacagtactccacggggcaggtcagcgtggagatcgagtgggagctgcagaaagagaacagcaaacgctggaaccccgagatccagtatacctccaactacaacaagtctgttaatgtggactttactgtggacactaatggcgtgtattcagagcctcgccccattggcacaagatacctgactcgtaatctgtaa

SEQ ID NO: 3479 - DNA, 2208 bp, Artificial Sequence
  source: /note="Description of Artificial Sequence: Synthetic polynucleotide"
atggctgccgatggttatcttccagattggctcgaggacactctctctgaaggaataagacagtggtggaagctcaaacctggcccaccaccgccaaagcccgcagagcggcataaggacgacagcaggggtcttgtgcttcctgggtacaagtacctcggacccttcaacggactcgacaaaggagagccggtcaacgaggcagacgccgcggccctcgagcacgacgaggcctacgaccggcagctcgacagcggagacaacccgtacctcaagtacaaccacgccgacgcggagtttcaggagcgccttaaagaagatacgtcttttgggggcaacctcgcaagagcagtattccaggcgaaaaagagggttcttgaacctctgggcctggttgaggagcctgttaagacggctccgggaaaaaagaggccggtagagcactctcctgcggagctagattcctcctccggaactggaaagtcgggccaacagcctgcaagaaagagattgaattttggtcagactggagacgcagactccgtacctgacccccagcctctcggacagccaccagcagccccctctggtctgggaactaatacgatggcttcaggcagtggcgcaccaatggcagacaataacgagggcgccgacggagtgggtaattcctcgggaaattggcattgcgattccacatggatgggcgacagagtcatcaccaccagcacccgcacctgggctctgcccacctacaacaaccatctgtacaagcaaatttccagccagtctggggccagcaacgacaaccactactttggctacagcaccccttgggggtattttgacttcaacagattccactgccacttctccccacgtgactggcaaagactcatcaacaacaattggggattccggcccaaaagactcaacttcaagctctttaacattcaagtcaaggaggtcacgcagaatgacggtacgacgacgattgtcaataaccttaccagcacggttcaggtgtttactgactcggagtaccagctcccgtacgtcctcggctcggcgcatcaaggatgcctcccgccgttcccagcagacgtcttcatggtgccacagtatggatacctcaccctgaacaacgggagtcaggcggtaggacgctcttcattttactgcctggagtactttccttctcagatgctgcgtaccggaaacaactttaccttcagctacacctttgaggacgttccttttcacagcagctacgctcacagccagagtttggaccgtctcatgaatcctctcatcgaccagtacctgtattacttgagcagaacaaacactccaagcggaaccactacgcagtccaggcttcagttttctcaagccggagcgagtgacattcgggaccagtctaggaactggcttcctggaccctgttaccgccagcagcgagtatcaaagacagctgcggacaacaacaacagtgattactcgtggactggagctaccaagtatcacctcaatggaagagactctctggtgaatccgggcacagccatggccagccacaaggacgatgaagaaaagtattttcctcagagcggggttctcatcttcggaaaacaagactcgggaaaaactaatgtggacattgaaaaggtcatgattacagacgaagaggaaatcaggaccaccaatcccgtggctacggagcagtatggttctgtatctaccaatctccagagcggcaacacacaagcagctacctcagatgtcaacacacaaggcgttcttccaggcatggtctggcaggacagagacgtgtacctgcagggacccatctgggcaaagattccacacacggacggacattttcacccttctcctcttatgggaggatttggaccgaagcaccctcccccgcagattctcatcaagaataccccggtacctgcgaatccttctaccaccttcagcgcggcaaagtttgcttacttcatcacacagtactccacggggcaggtcagcgtggagatcgagtgggagctgcagaaagagaacagcaaacgctggaaccccgagatccagtatacctccaactacaacaagtctgttaatgtggactttactgtggacactaatggcgtgtattcagagcctcgccccattggcacaagatacctgactcgtaatctgtaa

SEQ ID NO: 3480 - DNA, 2208 bp, Artificial Sequence
  source: /note="Description of Artificial Sequence: Synthetic polynucleotide"
atggctgccgatggttatcttccagattggctcgaggacactctctctgaaggaataagacagtggtggaagctcaaacctggcccaccaccgccaaagcccgcagagcggcataaggacgacagcaggggtcttgtgcttcctgggtacaagtacctcggacccttcaacggactcgacaaaggagagccggtcaacgaggcagacgccgcggccctcgagcacgacaaggcctacgaccggcagctcgacagcggagacaacccgtacctcaagtacaaccacgccgacgcggagtttcaggagcgccttaaagaagatacgtcttttgggggcaacctcgcaagagcagtattccaggcgaaaaagagggttcttgaacctctgggcctggttgaggagcctgttaagacggctccgggaaaaaagaggccggtagagcactctcctgcggagctagattcctcctccggaactggaaagtcgggccaacagcctgcaagaaagagattgaattttggtcagactggagacgcagactccgtacctgacccccagcctctcggacagccaccagcagccccctctggtctgggaactaatacgatggcttcaggcagtggcgcaccaatggcagacaataacgagggcgccgacggagtgggtaattcctcgggaaattggcattgcgattccacatggatgggcgacagagtcatcaccaccagcacccgcacctgggctctgcccacctacaacaaccatctgtacaagcaaatttccagccagtctggggccagcaacgacaaccactactttggctacagcaccccttgggggtattttgacttcaacagattccactgccacttctccccacgtgactggcaaagactcatcaacaacaattggggattccggcccaaaagactcaacttcaagctctttaacattcaagtcaaggaggtcacgcagaatgacggtacgacgacgattgccaataaccttaccagcacggttcaggtgtttactgactcggagtaccagctcccgtacgtcctcggctcggcgcatcaaggatgcctcccgccgttcccagcagacgtcttcatggtgccacagtatggatacctcaccctgaacaacgggagtcaggcggtaggacgctcttcattttactgcctggagtactttccttctcagatgctgcgtaccggaaacaactttaccttcagctacacctttgaggacgttccttttcacagcagctacgctcacagccagagtttggaccgtctcatgaatcctctcatcgaccagtacctgtattacttgagcagaacaaacactccaagcggaaccactacgcagtccaggcttcagttttctcaagccggagcgagtggcattcgggaccagtctaggaactggcttcctggaccctgttaccgccagcagcgagtatcaaagacagctgcggacaacaacaacagtgattactcgtggactggagctaccaagtatcacctcaatggaagggactctctggtgaatccgggcacagccatggccagccacaaggacgatgaagaaaagtattttcctcagagcggggttctcatcttcggaaaacaagactcgggaaaaactaatgtggacattgaaaaggtcatgattacagacgaagaggaaatcaggaccaccaatcccgtggctacggagcagtatggttctgtatctaccaatctccagagcggcaacacacaagcagctacctcagatgtcaacacacaaggcgttcttccaggcatggtctggcaggacagagacgtgtacctgcagggacccatctgggcaaagattccacacacggacggacattttcacccttctcctcttatgggaggatttggaccgaagcaccctcccccgcagattctcatcaagaataccccggtacctgcgaatccttctaccaccttcagcgcggcaaagtttgcttccttcatcacacagtactccacggggcaggtcagcgtggagatcgagtgggagctgcagaaagagaacagcaaacgctggaaccccgagatccagtatacctccaactacaacaagtctgttaatgtggactttactgtggacactaatggcgtgtattcagagcctcgccccattggcacaagatacctgactcgtaatctgtaa

SEQ ID NO: 3481 - DNA, 2208 bp, Artificial Sequence
  source: /note="Description of Artificial Sequence: Synthetic polynucleotide"
atggctgccgatggttatcttccagattggctcgaggacactctctctgaaggaataagacagtggtggaagctcaaacctggcccaccaccgccaaagcccgcagagcggcataaggacgacagcaggggtcttgtgcttcctgggtacaagtacctcggacccttcaacggactcgacaaaggagagccggtcaacgaggcagacgccgcggccctcgagcacgacaaggcctacgaccggcagctcgacagcggagacaacccgtacctcaagtacaaccacgccgacgcggagtttcaggagcgccttaaagaagatacgtcttttgggggcaacctcgcaagagcagtattccaggcgaaaaagagggttcttgaacctctgggcctggttgaggagcctgttaagacggctccgggaaaaaagaggccggtagagcactctcctgcggagctagattcctcctccggaactggaaagtcgggccaacagcctgcaagaaagagattgaattttggtcagactggagacgcagactccgtacctgacccccagcctctcggacagccaccagcagccccctctggtctgggaactaatacgatggcttcaggcagtggcgcaccaatggcagacaataacgagggcgccgacggagtgggtaattcctcgggaaattggcattgcgattccacatggatgggcgacagagtcatcaccaccagcacccgcacctgggctctgcccacctacaacaaccatctgtacaagcaaatttccagccagtctggggccagcaacgacaaccactactttggctacagcaccccttgggggtattttgacttcaacagattccactgccacttctccccacgtgactggcaaagactcatcaacaacaattggggattccggcccaaaagactcaacttcaagctctttaacattcaagtcaaggaggtcacgcagaatgacggtacgacgacgattgccaataaccttaccagcacggttcaggtgtttactgactcggagtaccagctcccgtacgtcctcggctcggcgcatcaaggatgcctcccgccgttcccagcagacgtcttcatggtgccacagtatggatacctcaccctgaacaacgggagtcaggcggtaggacgctcttcattttactgcctggagtactttccttctcagatgctgcgtaccggaaacaactttaccttcagctacacctttgaggacgttccttttcacagcagctacgctcacagccagagtttggaccgtctcatgaatcctctcatcgaccagtacctgtattacttgagcagaacaaacactccaagcggaaccactacgcagtccaggcttcagttttctcaagccggagcgagtgacattcgggaccagtctaggaactggcttcctggaccctgttaccgccagcagcgagtatcaaagacagctgcggacaacaacaacagtgattactcgtggactggagctaccaagtatcacctcaatggaagagactctctggtgaatccgggcacagccatggccagccacaaggacgatgaagaaaagtattttcctcagagcggggttctcatcttcggaaaacaagactcgggaaaaactaatgtggacattgaaaaggtcgtgattacagacgaagaggaaatcaggaccaccaatcccgtggctacggagcagtatggttctgtatctaccaatctccagagcggcaacacacaagcagctacctcagatgtcaacacacaaggcgttcttccaggcatggtctggcaggacagagacgtgtacctgcagggacccatctgggcaaagattccacacacggacggacattttcacccttctcctcttatgggaggatttggaccgaagcaccctcccccgcagattctcatcaagaataccccggtacctgcgaatccttctaccaccttcagcgcggcaaagtttgcttccttcatcacacagtactccacggggcaggtcagcgtggagatcgagtgggagctgcagaaagagaacagcaaacgctggaaccccgagatccagtatacctccaactacaacaagtctgttaatgtggactttactgtggacactaatggcgtgtattcagagcctcgccccattggcacaagatacctgactcgtaatctgtaa

SEQ ID NO: 3482 - DNA, 2208 bp, Artificial Sequence
  source: /note="Description of Artificial Sequence: Synthetic polynucleotide"
atggctgccgatggttatcttccagattggctcgaggacactctctctgaaggaataagacagtggtggaagctcaaacctggcccaccaccgccaaagcccgcagagcggcataaggacgacagcaggggtcttgtgcttcctgggtacaagtacctcggacccttcaacggactcgacaaaggagagccggtcaacgaggcagacgccgcggccctcgagcacgacaaggcctacgaccggcagctcgacagcggagacaacccgtacctcaagtacaaccacgccgacgcggagtttcaggagcgccttaaagaagatacgtcttttgggggcaacctcgcaagagcagtattccaggcgaaaaagagggttcttgaacctctgggcctggttgaggagcctgttaagacggctccgggaaaaaagaggccggtagagcactctcctgcggagctagattcctcctccggaactggaaagtcgggccaacagcctgcaagaaagagattgaattttggtcagactggagacgcagactccgtacctgacccccagcctctcggacagccaccagcagccccctctggtctgggaactaatacgatggcttcaggcagtggcgcaccaatggcagacaataacgagggcgccgacggagtgggtaattcctcgggaaattggcattgcgattccacatggatgggcgacagagtcatcaccaccagcacccgcacctgggctctgcccacctacaacaaccatctgtacaagcaaatttccagccagtctggggccagcaacgacaaccactactttggctacagcaccccttgggggtattttgacttcaacagattccactgccacttctccccacgtgactggcaaagactcatcaacaacaattggggattccggcccaaaagactcaacttcaagctctttaacattcaagtcaaggaggtcacgcagaatgacggtacgacgacgattgccaataaccttaccagcacggttcaggtgtttactgactcggagtaccagctcccgtacgtcctcggctcggcgcatcaaggatgcctcccgccgttcccagcagacgtcttcatggtgccacagtatggatacctcaccctgaacaacgggagtcaggcggtaggacgctcttcattttactgcctggagtactttccttctcagatgctgcgtaccggaaacaactttaccttcagctacacctttgaggacgttccttttcacagcagctacgctcacagccagagtttggaccgtctcatgaatcctctcatcgaccagtacctgtattacttgagcagaacaaacactccaagcggaaccactacgcagtccaggcttcagttttctcaagccggagcgagtgacattcgggaccagtctaggaactggcttcctggaccctgttaccgccagcagcgagtatcaaagacagctgcggacaacaacaacagtgattactcgtggactggagctaccaagtatcacctcaatggaagagactctctggtgaatccgggcacagccatggccagccacaaggacgatgaagaaaagtattttcctcagagcggggttctcatcttcggaaaacaagactcgggaaaaactaatgtggacattgaaaaggtcatgattacagacgaagaggaaatcaggaccaccaatcccgtggctacggagcagtatggttctgtatctaccaatctccagagcggcgacacacaagcagctacctcagatgtcaacacacaaggcgttcttccaggcatggtctggcaggacagagacgtgtacctgcagggacccatctgggcaaagattccacacacggacggacattttcacccttctcctcttatgggaggatttggaccgaagcaccctcccccgcagattctcatcaagaataccccggtacctgcgaatccttctaccaccttcagcgcggcaaagtttgcttccttcatcacacagtactccacggggcaggtcagcgtggagatcgagtgggagctgcagaaagagaacagcaaacgctggaaccccgagatccagtatacctccaactacaacaagtctgttaatgtggactttactgtggacactaatggcgtgtattcagagcctcgccccattggcacaagatacctgactcgtaatctgtaa

SEQ ID NO: 3483 - DNA, 2208 bp, Artificial Sequence
  source: /note="Description of Artificial Sequence: Synthetic polynucleotide"
atggctgccgatggttatcttccagattggctcgaggacactctctctgaaggaataagacagtggtggaagctcaaacctggcccaccaccgccaaagcccgcagagcggcataaggacgacagcaggggtcttgtgcttcctgggtacaagtacctcggacccttcaacggactcgacaaaggagagccggtcaacgaggcagacgccgcggccctcgagcacgacaaggcctacgaccggcagctcgacagcggagacaacccgtacctcaagtacaaccacgccgacgcggagtttcaggagcgccttaaagaagatacgtcttttgggggcaacctcgcaagagcagtattccaggcgaaaaagagggttcttgaacctctgggcctggttgaggagcctgttaagacggctccgggaaaaaagaggccggtagagcactctcctgcggagctagattcctcctccggaactggaaagtcgggccaacagcctgcaagaaagagattgaattttggtcagactggagacgcagactccgtacctgacccccagcctctcggacagccaccagcagccccctctggtctgggaactaatacgatggcttcaggcagtggcgcaccaatggcagacaataacgagggcgccgacggagtgggtaattcctcgggaaattggcattgcgattccacatggatgggcgacagagtcatcaccaccagcacccgcacctgggctctgcccacctacaacaaccatctgtacaagcaaatttccagccagtctggggccagcaacgacaaccactactttggctacagcaccccttgggggtattttgacttcaacagattccactgccacttctccccacgtgactggcaaagactcatcaacaacaattggggattccggcccaaaagactcaacttcaggctctttaacattcaagtcaaggaggtcacgcagaatgacggtacgacgacgattgccaataaccttaccagcacggttcaggtgtttactgactcggagtaccagctcccgtacgtcctcggctcggcgcatcaaggatgcctcccgccgttcccagcagacgtcttcatggtgccacagtatggatacctcaccctgaacaacgggagtcaggcggtaggacgctcttcattttactgcctggagtactttccttctcagatgctgcgtaccggaaacaactttaccttcagctacacctttgaggacgttccttttcacagcagctacgctcacagccagagtttggaccgtctcatgaatcctctcatcgaccagtacctgtattacttgagcagaacaaacactccaagcggaaccactacgcagtccaggcttcagttttctcaagccggagcgagtgacattcgggaccagtctaggaactggcttcctggaccctgttaccgccagcagcgagtatcaaagacagctgcggacaacaacaacagtgattactcgtggactggagctaccaagtatcacctcaatggaagagactctctggtgaatccgggcacagccatggccagccacaaggacgatgaagaaaagtattttcctcagagcggggttctcatcttcggaaaacaagactcgggaaaaactaatgtggacattgaaaaggtcatgattacagacgaagaggaaatcaggaccaccaatcccgtggctacggagcagtatggttctgtatctaccaatctccagagcggcaacacacaagcagctacctcagatgtcaacacacaaggcgttcttccaggcatggtctggcaggacagagacgtgtacctgcagggacccatctgggcaaagattccacacacggacggacattttcacccttctcctcttatgggaggatttggaccgaagcaccctcccccgcagattctcatcaagaataccccggtacctgcgaatccttctaccaccttcagcgcggcaaagtttgcttccttcatcacacagtactccacggggcaggtcagcgtggagatcgagtgggagctgcagaaagagaacagcaaacgctggaaccccgagatccagtatacctccaactacaacaagtctgttaatgtggactttactgtggacactaatggcgtgtattcagagcctcgccccattggcacaagatacctgactcgtaatctgtaa

SEQ ID NO: 3484 - DNA, 2208 bp, Artificial Sequence
  source: /note="Description of Artificial Sequence: Synthetic polynucleotide"
atggctgccgatggttatcttccagattggctcgaggacactctctctgaaggaataagacagtggtggaagctcaaacctggcccaccaccgccaaagcccgcagagcggcataaggacgacagcaggggtcttgtgcttcctgggtacaagtacctcggacccttcaacggactcgacaaaggagagccggtcaacgaggcagacgccgcggccctcgagcacggcaaggcctacgaccggcagctcgacagcggagacaacccgtacctcaagtacaaccacgccgacgcggagtttcaggagcgccttaaagaagatacgtcttttgggggcaacctcgcaagagcagtattccaggcgaaaaagagggttcttgaacctctgggcctggttgaggagcctgttaagacggctccgggaaaaaagaggccggtagagcactctcctgcggagctagattcctcctccggaactggaaagtcgggccaacagcctgcaagaaagagattgaattttggtcagactggagacgcagactccgtacctgacccccagcctctcggacagccaccagcagccccctctggtctgggaactaatacgatggcttcaggcagtggcgcaccaatggcagacaataacgagggcgccgacggagtgggtaattcctcgggaaattggcattgcgattccacatggatgggcgacagagtcatcaccaccagcacccgcacctgggctctgcccacctacaacaaccatctgtacaagcaaatttccagccagtctggggccagcaacgacaaccactactttggctacagcaccccttgggggtattttgacttcaacagattccactgccacttctccccacgtgactggcaaagactcatcaacaacaattggggattccggcccaaaagactcaacttcaagctctttaacattcaagtcaaggaggtcacgcagaatgacggtacgacgacgattgccaataaccttaccagcacggttcaggtgtttactgactcggagtaccagctcccgtacgtcctcggctcggcgcatcaaggatgcctcccgccgttcccagcagacgtcttcatggtgccacagtatggatacctcaccctgaacaacgggagtcaggcggtaggacgctcttcattttactgcctggagtactttccttctcagatgctgcgtaccggaaacaactttaccttcagctacacctttgaggacgttccttttcacagcagctacgctcacagccagagtttggaccgtctcatgaatcctctcatcgaccagtacctgtattacttgagcagaacaaacactccaagcggaaccactacgcagtccaggcttcagttttctcaagccggagcgagtgacattcgggaccagtctaggaactggcttcctggaccctgttaccgccagcagcgagtatcaaagacagctgcggacaacaacaacagtgattactcgtggactggagctaccaagtatcacctcaatggaagagactctctggtgaatccgggcacagccatggccagccacaaggacgatgaagaaaagtattttcctcagagcggggttctcatcttcggaaaacaagactcgggaaaaactaatgtggacattgaaaaggtcatgattacagacgaagaggaaatcaggaccaccaatcccgtggctacggagcagtatggttctgtatctaccaatctccagagcggcaacacacaagcagctacctcagatgtcaacacacaaggcgttcttccaggcatggtctggcaggacagagacgtgtacctgcagggacccatctgggcaaagattccacacacggacggacattttcacccttctcctcttatgggaggatttggaccgaagcaccctcccccgcagattctcatcaagaataccccggtacctgcgaatccttctaccaccttcagcgcggcaaagtttgcttccttcatcacacagtactccacggggcaggtcagcgtggagatcgagtgggagctgcagaaagagaacagcaaacgctggaaccccgagatccagtatacctccaactacaacaagtctgttaatgtggactttactgtggacactaatggcgtgtattcagagcctcgccccattggcacaagatacctgactcgtaatctgtaa

SEQ ID NO: 3485 - DNA, 2208 bp, Artificial Sequence
  source: /note="Description of Artificial Sequence: Synthetic polynucleotide"
atggctgccgatggttatcttccagattggctcgaggacactctctctgaaggaataagacagtggtggaagctcaaacctggcccaccaccgccaaagcccgcagagcggcataaggacgacagcaggggtcttgtgcttcctgggtacaagtacctcggacccttcaacggactcgacaaaggagagccggtcaacgaggcagacgccgcggccctcgagcacgacaaggcctacgaccggcagctcgacagcggagacaacccgtacctcaagtacaaccacgccgacgcggagtttcaggagcgccttaaagaagatacgtcttttgggggcaacctcgcaagagcagtattccaggcgaaaaagagggttcttgaacctctgggcctggttgaggagcctgttaagacggctccgggaaaaaagaggccggtagagcactctcctgcggagctagattcctcctccggaactggaaagtcgggccaacagcctgcaagaaagagattgaattttggtcagactggagacgcagactccgtacctgacccccagcctctcggacagccaccagcagccccctctggtccgggaactaatacgatggcttcaggcagtggcgcaccaatggcagacaataacgagggcgccgacggagtgggtaattcctcgggaaattggcattgcgattccacatggatgggcgacagagtcatcaccaccagcacccgcacctgggctctgcccacctacaacaaccatctgtacaagcaaatttccagccagtctggggccagcaacgacaaccactactttggctacagcaccccttgggggtattttgacttcaacagattccactgccacttctccccacgtgactggcaaagactcatcaacaacaattggggattccggcccaaaagactcaacttcaagctctttaacattcaagtcaaggaggtcacgcagaatgacggtacgacgacgattgccaataaccttaccagcacggttcaggtgtttactgactcggagtaccagctcccgtacgtcctcggctcggcgcatcaaggatgcctcccgccgttcccagcagacgtcttcatggtgccacagtatggatacctcaccctgaacaacgggagtcaggcggtaggacgctcttcattttactgcctggagtactttccttctcagatgctgcgtaccggaaacaactttaccttcagctacacctttgaggacgttccttttcacagcagctacgctcacagccagagtttggaccgtctcatgaatcctctcatcgaccagtacctgtattacttgagcagaacaaacactccaagcggaaccactacgcagtccaggcttcagttttctcaagccggagcgagtgacattcgggaccagtctaggaactggcttcctggaccctgttaccgccagcagcgagtatcaaagacagctgcggacaacaacaacagtgattactcgtggactggagctaccaagtatcacctcaatggaagagactctctggtgaatccgggcacagccatggccagccacaaggacgatgaagaaaagtattttcctcagagcggggttctcatcttcggaaaacaagactcgggaaaaactaatgtggacattgaaaaggtcatgattacagacgaagaggaaatcaggaccaccaatcccgtggctacggagcagtatggttctgtatctaccaatctccagagcggcaacacacaagcagctacctcagatgtcaacacacaaggcgttcttccaggcatggtctggcaggacagagacgtgtacctgcagggacccatctgggcaaagattccacacacggacggacattttcacccttctcctcttatgggaggatttggaccgaagcaccctcccccgcagattctcatcaagaataccccggtacctgcgaatccttctaccaccttcagcgcggcaaagtttgcttccttcatcacacagtactccacggggcaggtcagcgtggagatcgagtgggagctgcagaaagagaacagcaaacgctggaaccccgagatccagtatacctccaactacaacaagtctgttaatgtggactttactgtggacaccaatggcgtgtattcagagcctcgccccattggcacaagatacctgactcgtaatctgtaa

SEQ ID NO: 3486 - DNA, 2208 bp, Artificial Sequence
  source: /note="Description of Artificial Sequence: Synthetic polynucleotide"
atggctgccgatggttatcttccagattggctcgaggacactctctctgaaggaataagacagtggtggaagctcaaacctggcccaccaccgccaaagcccgcagagcggcataaggacgacagcaggggtcttgtgcttcctgggtacaagtacctcggacccttcaacggactcgacaaaggagagccggtcaacgaggcagacgccgcggccctcgagcacgacaaggcctacgaccggcagctcgacagcggagacaacccgtacctcaagtacaaccacgccgacgcggagtttcaggagcgccttaaagaagatacgtcttttgggggcaacctcgcaagagcagtattccaggcgaaaaagagggttcttgaacctctgggcctggttgaggagcctgttaagacggctccgggaaaaaagaggccggtagagcactctcctgcggggccagattcctcctccggaactggaaagtcgggccaacagcctgcaagaaagagattgaattttggtcagactggagacgcagactccgtacctgacccccagcctctcggacagccaccagcagccccctctggtctgggaactaatacgatggcttcaggcagtggcgcaccaatggcagacaataacgagggcgccgacggagtgggtaattcctcgggaaattggcattgcgattccacatggatgggcgacagagtcatcaccaccagcacccgcacctgggctctgcccacctacaacaaccatctgtacaagcaaatttccagccagtctggagccagcaacgacaaccactactttggctacagcaccccttgggggtattttgacttcaacagattccactgccacttctccccacgtgactggcaaagactcatcaacaacaattggggattccggcccaaaagactcaacttcgagctctttaacattcaagtcaaggaggtcacgcagaatgacggtacgacgacgattgccaataaccttaccagcacggttcaggtgtttactgactcggagtaccagctcccgtacgtcctcggctcggcgcatcaaggatgcctcccgccgttcccagcagacgtcttcatggtgccacagtatggatacctcaccctgaacaacgggagtcaggcggtaggacgctcttcattttactgcctggagtactttccttctcagatgctgcgtaccggaaacaactttaccttcagctacacctttgaggacgttccttttcacagcagctacgctcacagccagagtttggaccgtctcatgaatcctctcatcgaccagtacctgtattacttgagcagaacaaacactccaagcggaaccactacgcagtccaggcttcagttttctcaagccggagcgagtgacattcgggaccagtctaggaactggcttcctggaccctgttaccgccagcagcgagtatcaaagacagctgcggacaacaacaacagtgattactcgtggactggagctaccaagtatcacctcaatggaagagactctctggtgaatccgggcacagccatggccagccacaaggacgatgaagaaaagtattttcctcagagcggggttctcatcttcggaaaacaagactcggaaaaaactaatgtggacattgaaaaggtcatgattacagacgaagaggaaatcaggaccaccaatcccgtggctacggagcagtatggttctgtatctaccaatctccagagcggcaacacacaagcagctacctcagatgtcaacacacaaggcgttcttccaggcatggtctggcaggacagagacgtgtacctgcagggacccatctgggcaaagattccacacacggacggacactttcacccttctcctcttatgggaggatttggactgaagcaccctcccccgcagattctcatcaagagtaccccggtacctgcgaatccttctaccaccttcagcgcggcaaagtttgcttccttcatcacacagtactccacggggcaggtcagcgtggagatcgagtgggagctgcagaaagagaacagcaaacgctggaaccccgagatccagtatacctccaactacaacaagtctgttaatgtggactttactgtggacactaatggcgtgtattcagagcctcgccccattggcacaagatacctgactcgtaatctgtaa

SEQ ID NO: 3487 - DNA, 2208 bp, Artificial Sequence
  source: /note="Description of Artificial Sequence: Synthetic polynucleotide"
atggctgccgatggttatcttccagattggctcgaggacactctctctgaaggaataagacagtggtggaagctcaaacctggcccaccaccgccaaagcccgcagagcggcataaggacgacagcaggggtcttgtgcttcctgggtacaagtacctcggacccttcaacggactcgacaaaggagagccggtcaacgaggcagacgccgcggccctcgagcacgacaaggcctacgaccggcagctcgacagcggagacaacccgtacctcaagtacaaccacgccgacgcggagtttcaggagcgccttaaagaagatacgtcttttgggggcaacctcgcaagagcagtattccaggcgaaaaagagggttcttgaacctctgggcctggttgaggagcctgttaagacggctccgggaaaaaagaggccggtagagcactctcctgcggggccagattcctcctccggaactggaaagtcgggccaacagcctgcaagaaagagattgaattttggtcagactggagacgcagactccgtacctgacccccagcctctcggacagccaccagcagccccctctggtctgggaactaatacgatggcttcaggcagtggcgcaccaatggcagacaataacgagggcgccgacggagtgggtaattcctcgggaaattggcattgcgattccacatggatgggcgacagagtcatcaccaccagcacccgcacctgggctctgcccacctacaacaaccatctgtacaagcaaatttccagccagtctggagccagcaacgacaaccactactttggctacagcaccccttgggggtattttgacttcaacagattccactgccacttctccccacgtgactggcaaagactcatcaacaacaattggggattccggcccaaaagactcaacttcgagctctttaacattcaagtcaaggaggtcacgcagaatgacggtacgacgacgattgccaataaccttaccagcacggttcaggtgtttactgactcggagtaccagctcccgtacgtcctcggctcggcgcatcaaggatgcctcccgccgttcccagcagacgtcttcatggtgccacagtatggatacctcaccctgaacaacgggagtcaggcggtaggacgctcttcattttactgcctggagtactttccttctcagatgctgcgtaccggaaacaactttaccttcagctacacctttgaggacgttccttttcacagcagctacgctcacagccagagtttggaccgtctcatgaatcctctcatcgaccagtacctgtattacttgagcagaacaaacactccaagcggaaccactacgcagtccaggcttcagttttctcaagccggagcgagtgacattcgggaccagtctaggaactggcttcctggaccctgttaccgccagcagcgagtatcaaagacagctgcggacaacaacaacagtgattactcgtggactggagctaccaagtatcacctcaatggaagagactctctggtgaatccgggcacagccatggccagccacaaggacgatgaagaaaagtattttcctcagagcggggttctcatcttcggaaaacaagactcgggaaaaactaatgtggacattgaaaaggtcatgattacagacgaagaggaaatcaggaccaccaatcccgtggctacggagcagtatggttctgtatctaccaatctccagagcggcaacacacaagcagctacctcagatgtcaacacacaaggcgttcttccaggcatggtctggcaggacagagacgtgtacctgcagggacccatctgggcaaagattccacacacggacggacactttcacccttctcctcttatgggaggatttggactgaagcaccctcccccgcagattctcatcaagagtaccccggtacctgcgaatccttctaccaccctcagcgcggcaaagtttgcttccttcatcacacagtactccacggggcaggtcagcgtggagatcgagtgggagctgcagaaagagaacagcaaacgctggaaccccgagatccagtatacctccaactacaacaagtctgttaatgtggactttactgtggacactaatggcgtgtattcagagcctcgccccattggcacaagatacctgactcgtaatctgtaa

SEQ ID NO: 3488 - DNA, 2205 bp, Artificial Sequence
  source: /note="Description of Artificial Sequence: Synthetic polynucleotide"
atggctgccgatggttatcttccagattggctcgaggacactctctctgaaggaataagacagtggtggaagctcaaacctggcccaccaccgccaaagcccgcagagcggcataaggacgacagcaggggtcttgtgcttcctgggtacaagtacctcggacccttcaacggactcgacaaaggagagccggtcaacgaggcagacgccgcggccctcgagcacgacaaggcctacgaccggcagctcgacagcggagacaacccgtacctcaagtacaaccacgccgacgcggagtttcaggagcgccttaaagaagatacgtcttttgggggcaacctcgcaagagcagtattccaggcgaaaaagagggttcttgaacctctgggcctggttgaggagcctgttaagacggctccgggaaaaaagaggccggtagagcactctcctgcggggccagattcctcctccggaactggaaagtcgggccaacagcctgcaagaaagagattgaattttggtcagactggagacgcagactccgtacctgacccccagcctctcggacagccaccagcagccccctctggtctgggaactaatacgatggcttcaggcagtggcgcaccaatggcagacaataacgagggcgccgacggagtgggtaattcctcgggaaattggcattgcgattccacatggatgggcgacagagtcatcaccaccagcacccgcacctgggctctgcccacctacaacaaccatctgtacaagcaaatttccagccagtctggagccagcaacgacaaccactactttggctacagcaccccttgggggtattttgacttcaacagattccactgccacttctccccacgtgactggcaaagactcatcaacaacaattggggattccggcccaaaagactcaacttcgagctctttaacattcaagtcaaggaggtcacgcagaatgacggtacgacgacgattgccaataaccttaccagcacggttcaggtgtttactgactcggagtaccagctcccgtacgtcctcggctcggcgcatcaaggatgcctcccgccgttcccagcagacgtcttcatggtgccacagtatggatacctcaccctgaacaacgggagtcaggcggtaggacgctcttcattttactgcctggagtactttccttctcagatgctgcgtaccggaaacaactttaccttcagctacacctttgaggacgttccttttcacagcagctacgctcacagccagagtttggaccgtctcatgaatcctctcatcgaccagtacctgtattacttgagcagaacaaacactccaagcggaaccactacgcagtccaggcttcagttttctcaagccggagcgagtgacattcgggaccagtctaggaactggcttcctggaccctgttaccgccagcagcgagtatcaaagacagctgcggacaacaacagtgattactcgtggactggagctaccaagtatcacctcaatggaagagactctctggtgaatccgggcacagccatggccagccacaaggacgatgaagaaaagtattttcctcagagcggggttctcatcttcggaaaacaagactcgggaaaaactaatgtggacattgaaaaggtcatgattacagacgaagaggaaatcaggaccaccaatcccgtggctacggagcagtatggttctgtatctaccaatctccagagcggcaacacacaagcagctacctcagatgtcaacacacaaggcgttcttccaggcatggtctggcaggacagagacgtgtacctgcagggacccatctgggcaaagattccacacacggacggacactttcacccttctcctcttatgggaggatttggactgaagcaccctcccccgcagattctcatcaagagtaccccggtacctgcgaatccttctaccaccttcagcgcggcaaagtttgcttccttcatcacacagtactccacggggcaggtcagcgtggagatcgagtgggagctgcagaaagagaacagcaaacgctggaaccccgagatccagtatacctccaactacaacaagtctgttaatgtggactttactgtggacactaatggcgtgtattcagagcctcgccccattggcacaagatacctgactcgtaatctgtaa

SEQ ID NO: 3489 - DNA, 2208 bp, Artificial Sequence
  source: /note="Description of Artificial Sequence: Synthetic polynucleotide"
atggctgccgatggttatcttccagattggctcgaggacactctctctgaaggaataagacagtggtggaagctcaaacctggcccaccaccgccaaagcccgcagagcggcataaggacgacagcaggggtcttgtgcttcctgggtacaagtacctcggacccttcaacggactcgacaagggggagccggtcaacgaggcagacgccgcggccctcgagcacgacaaggcctacgaccggcagctcgacagcggagacaacccgtacctcaagtacaaccacgccgacgcggagtttcaggagcgtcttaaagaagatacgtcttttgggggcaacctcggacgaacagtcttccaggcgaaaaagagggttcttgaacctctgggcctggttgaggaacctgttaagacggctccgggaaaaaagaggccggtagagcactctcctgtggagccagactcctcctcgggaaccggaaaggcgggccagcagcctgcaagaaaaagattgaatttcggtcagactggagacgcagactccgtacctgacccccagcctctcggacagccaccagcagccccctctggtctgggaactaatacgatggctacaggcagtggcgcaccaatggcagacaataacgagggcgccgacggagtgggtaattcctcgggaaattggcattgcgattccacatggatgggcgacagagtcatcaccaccagcacccgcacctgggctctgcccacctacaacaaccatctgtacaagcaaatttccagccaatcaggagcatcgaacgacaaccactactttggctacagcaccccctgggggtattttgacttcaacagattccactgccacttttcgccacgtgactggcaaagactcatcaacaacaactggggattccggcccaagagactcagcttcaagctctttaacattcaagtcaaggaggtcacgcagaatgacggtacgacgacgattgccaataaccttaccagcacggttcaggtctttactgactcggagtaccagctcccgtacgtcctcggctcggcgcatcaaggatgcctcccgccgttcccagcagacgtcttcatggtgccacagtatggatacctcaccctgaacaacgggagtcaggcggtaggacgctcttcattttactgcctggagtacttcccttctcagatgcttcgcacgggaaacaactttaccttcagctacacctttgaggacgtgccttttcacagcagctacgctcacagccaaagtctggaccgtctcatgaatcctctcatcgaccaatacctgtattacttgagcaaaacaaacgctccaagcggaaccaccacgatgtccaggcttcagttttctcaggccggagcgagtgacattcgggaccagtctagaaactggcttcctggaccctgttaccgccagcagcgagtatcaaagacagctgcggacaacaacaacagtgattactcgtggactggagctaccaagtaccacctcaatggaagagactctctggtgaacccgggcccagctatggccagccacaaggatgatgaagaaaaatattttcctcagagcggggttctcatcttcgggaaacaaggctcaaataaaactaatgtggacattgaaaaggttatgattacagacgaagaggaaatcaggaccaccaatcccgtggctacggagcagtatggttctgtatctaccaaccttcaaagcggcaacacacaagcagctacctcagatgtcaacacacaaggcgttcttcctggcatggtctggcaggacagagatgtgtacctgcaggggcccatctgggcaaagattcctcacacggacggacactttcacccttctcccctcatgggcggatttggattgaagcaccctcccccacagattctcatcaagaataccccggtacctgcgaatccttcgaccaccttcagtgcggcaaagtttgcttccttcatcacacagtattccacgggacaggtcagcgtggagatagagtgggagctgcagaaggagaacagcaaacgctggaaccccgagatccagtatacttccaactacaacaaatctgttaatgtggactttactgtggacactaatggtgtgtattcagagcctcgccccattggcaccagatacctgactcgtaatctgtaa

SEQ ID NO: 3490 - DNA, 2208 bp, Artificial Sequence
  source: /note="Description of Artificial Sequence: Synthetic polynucleotide"
atggctgccgatggttatcttccagattggctcgaggacactctctctgaaggaataagacagtggtggaagctcaaacctggcccaccaccgccaaagcccgcagagcggcataaggacgacagcaggggtcttgtgcttcctgggtacaagtacctcggacccttcaacggactcgacaagggggagccggtcaacgaggcagacgccgcggccctcgagcacgacaaggcctacgaccggcagctcgacagcggagacaacccgtacctcaagtacaaccacgccgacgcggagtttcaggagcgtcttaaagaagatacgtcttttgggggcaacctcggacgagcagtcttccaggcgaaaaagagggttcttgaacctctgggcctggttgaggaacctgttaagacggctccgggaaaaaagaggccggtagagcactctcctgtggagccagactcctcctcgggaaccggaaaggcgggccagcagcctgcaagaaaaagattgaatttcggtcagactggagacgcagactccgtacctgacccccagcctctcggacagccaccagcagccccctctggtctgggaactaatacgatggctacaggcagtggcgcaccaatggcagacaataacgagggcgccgacggagtgggtaattcctcgggaaattggcattgcgattccacatggatgggcgacagagtcatcaccaccagcacccgcacctgggctctgcccacctacaacaaccatctgtacaagcaaatttccagccaatcaggagcatcgaacgacaaccactactttggctacagcaccccctgggggtattttgacttcaacagattccactgccacttttcgccacgtgactggcaaagactcatcaacaacaactggggattccggcccaagagactcagcttcaagctctttaacattcaagtcaaggaggtcacgcagaatgacggtacgacgacgattgccaataaccttaccagcacggttcaggtctttactgactcggagtaccagctcccgtacgtcctcggctcggcgcatcaaggatgcctcccgccgttcccagcagacgtcttcatggtgccacagtatggatacctcaccctgaacaacgggagtcaggcggtaggacgctcttcattttactgcctggagtacttcccttctcagatgcttcgcacgggaaacaactttaccttcagctacacctttgaggacgtgccttttcacagcagctacgctcacagccaaagtctggaccgtctcatgaatcctctcatcgaccaatacctgtattacttgagcaaaacaaacgctccaagcggaaccaccacgatgtccaggcttcagttttctcaggccggagcgagtgacattcgggaccagtctagaaactggcttcctggaccctgttaccgccagcagcgagtatcaaagacagctgcggacaacaacaacagtgattactcgtggactggagctaccaagtaccacctcaatggaagagactctctggtgaacccgggcccagctatggccaaccacaaggatgatgaagaaaaatattttcctcagagcggggttctcatcttcgggaaacaaggctcaaataaaactaatgtggacattgaaaaggttatgattacagacgaagaggaaatcaggaccaccaatcccgtggctacggagcagtatggttctgtatctaccaaccttcaaagcggcaacacacaagcagctacctcagatgtcaacacacaaggcgttcttcctggcatggtctggcaggacagagatgtgtacctgcaggggcccatctgggcaaagattcctcacacggacggacactttcacccttctcccctcatgggcggatttggattgaagcaccctcccccacagattctcatcaagaataccccggtacctgcgaatccttcgaccaccttcagtgcggcaaagtttgcttccttcatcacacagtattccacgggacaggtcagcgtggagatagagtgggagctgcagaaggagaacagcaaacgctggaaccccgagatccagtatacttccaactacaacaaatctgttaatgtggactttactgtggacactaatggtgtgtattcagagcctcgccccattggcaccagatacctgactcgtaatctgtaa

SEQ ID NO: 3491 - DNA, 2208 bp, Artificial Sequence
  source: /note="Description of Artificial Sequence: Synthetic polynucleotide"
atggctgccgatggttatcttccagattggctcgaggacactctctctgaaggaataagacagtggtggaagctcaaacctggcccaccaccgccaaagcccgcagagcggcataaggacgacagcaggggtcttgtgcttcctgggtacaagtacctcggacccttcaacggactcgacaagggggagccggtcaacgaggcagacgccgcggccctcgagcacgacaaggcctacgaccggcagctcgacagcggagacaacccgtacctcaagtacaaccacgccgacgcggagtttcaggagcgtcttaaagaagatacgtcttttgggggcaacctcggacgagcagtcttccaggcgaaaaagagggttcttgaacctctgggcctggttgaggaacctgttaagacggctccgggaaaaaagaggccggtagagcactctcctgtggagccagactcctcctcgggaaccggaaaggcgggccagcagcctgcaagaaaaagattgaatttcggtcagactggagacgcagactccgtacctgacccccagcctctcggacagccaccagcagccccctctggtctgggaactaatacgatggctacaggcagtggcgcaccaatggcagacaataacgagggcgccgacggagtgggtaattcctcgggaaattggcattgcgattccacatggatgggcgacagagtcatcaccaccagcacccgcacctgggctctgcccacctacaacaaccatctgtacaagcaaatttccagccaatcaggagcatcgaacgacaaccactactttggctacagcaccccctgggggtattttgacttcaacagattccactgccacttttcgccacgtgactggcaaagactcatcaacaacaactggggattccggcccaagagactcagcttcaagctctttaacattcaagtcaaggaggtcacgcagaatgacggtacgacgacgattgccaataaccttaccagcacggttcaggtctttactgactcggagtaccagctcccgtacgtcctcggctcggcgcatcaaggatgcctcccgccgttcccagcagacgtcttcatggtgccacagtatggatacctcaccctgaacaacgggagtcaggcggtaggacgctcttcattttactgcctggagtacttcccttctcagatgcttcgcacgggaaacaactttaccttcagctacacctttgaggacgtgccttttcacagcagctacgctcacagccaaagtctggaccgtctcatgaatcctctcatcgaccaatacctgtattacttgagcaaaacaaacgctccaagcggaaccaccacgatgtccaggcttcagttttctcaggccggagcgagtgacattcgggaccagtctagaaactggcttcctggaccctgttaccgccagcagcgagtatcaaagacagctgcggacaacaacaacagtgattactcgtggactggagctaccaagtaccacctcaatggaagagactctctggtgaacccgggcccagctatggccagccacaaggatgatgaagaaaaatattttcctcagagcggggttctcatcttcgggaaacaaggctcaaataaaactaatgtggacattgaaaaggttatgattacagacgaagaggaaatcaggaccaccaatcccgtggctacggagcagtatggttctgtatctaccaaccttcaaagcggcaacacacaagcagctacctcagatgtcaacacacaaggcgttcttcctggcatggtctggcaggacagagatgtgtacctgcaggggcccatctgggcaaagattcctcacacggacggacactttcacccttctcccctcatgggcggatttggattgaagcaccctcccccacagattctcatcaagaataccccggtacctgcgaatccttcgaccaccttcagtgcggcaaagtttgcttccttcatcacacagtattccacgggacaggtcagcgtggagatagagtgggagctgcagaaggagaacagcaaacgctggaaccccgagatccagtatacttccaactacaacaaatctgttaatgtggactttactgtggacactaatggtgtgtattcagagcctcgccccattggcaccagatacccgactcgtaatctgtaa

SEQ ID NO: 3492 - DNA, 2208 bp, Artificial Sequence
  source: /note="Description of Artificial Sequence: Synthetic polynucleotide"
atggctgccgatggttatcttccagattggctcgaggacactctctctgaaggaataagacagtggtggaagctcaaacctggcccaccaccgccaaagcccgcagagcggcataaggacgacagcaggggtcttgtgcttcctgggtacaagtacctcggacccttcaacggactcgacaagggggagccggtcaacgaggcagacgccgcggccctcgagcacgacaaggcctacgaccggcagctcgacagcggagacaacccgtacctcaagtacaaccacgccgacgcggagtttcaggagcgtcttaaagaagatacgtcttttgggggcaacctcggacgagcagtcttccaggcgaaaaagagggttcttgaacctctgggcctggttgaggaacctgttaagacggctccgggaaaaaagaggccggtagagcactctcctgtggagccagactcctcctcgggaaccggaaaggcgggccagcagcctgcaagaaaaagattgaatttcggtcagactggagacgcagactccgtacctgacccccagcctctcggacagccaccagcagccccctctggtctgggaactaatacgatggctacaggcagtggcgcaccaatggcagacaataacgagggcgccgacggagtgggtaattcctcgggaaattggcattgcgattccacatggatgggcgacagagtcatcaccaccagcacccgcacctgggctctgcccacctacaacaaccatctgtacaagcaaatttccagccaatcaggagcatcgaacgacaaccactactttggctacagcaccccctgggggtattttgacttcaacagattccactgccacttttcgccacgtgactggcaaagactcatcaacaacaactggggattccggcccaagagactcagcttcaagctctttaacattcaagtcaaggaggtcacgcagaatgacggtacgacgacgattgccaataaccttaccagcacggttcaggtctttactgactcggagtaccagctcccgtacgtcctcggctcggcgcatcaaggatgcctcccgccgttcccagcagacgtcttcatggtgccacagtatggatacctcaccctgaacaacgggagtcaggcggtaggacgctcttcattttactgcctggagtacttcccttctcagatgcttcgcacgggaaacaactttaccttcagctacacctttgaggacgtgccttttcacagcagctacgctcacagccaaagtctggaccgtctcatgaatcctctcatcgaccaatacctgtattacttgagcaaaacaaacgctccaagcggaaccaccacgatgtccaggcttcagttttctcaggccggagcgagtgacattcgggaccagtctagaaactggcttcctggaccctgttaccgccagcagcgagtatcaaagacagctgcggacaacaacaacagtgattactcgtggactggagctaccaagtaccacctcaatggaagagactctctggtgaacccgggcccagctatggccagccacaaggatgatgaagaaaaatattttcctcagagcggggttctcatcttcgggaaacaaggctcaaataaaactaatgtggacattgaaaaggttatgattacagacgaagaggaaatcaggaccaccaatcccgtggctacggagcagtatggttctgtatctaccaaccttcaaagcggcaacacacaagcagctacctcagatgtcaacacacaaggcgttcttcctggcatggtctggcaggacagagatgtgtacctgcaggggcccatctgggcaaagattcctcacacggacggacactttcacccttctcccctcatgggcggatttggattgaagcaccctcccccacagattctcatcaagaataccccggtacctgcgaatccttcgaccaccttcagtgcggcaaagtttgcttccttcatcacacagtattccacgggacaggtcagcgtggagatagagtgggagctgcagaaggagaacagcaaacgctggaaccccgagatccagtatacttccaactacaacaaatctgttaatgtggactttactgtgggcactaatggtgtgtattcagagcctcgccccattggcaccagatacctgactcgtaatctgtaa

SEQ ID NO: 3493 - DNA, 2208 bp, Artificial Sequence
  source: /note="Description of Artificial Sequence: Synthetic polynucleotide"
atggctgccgatggttatcttccagattggctcgaggacactctctctgaaggaataagacagtggtggaagctcaaacctggcccaccaccgccaaagcccgcagagcggcataaggacgacagcaggggtcttgtgcttcctgggtacaagtacctcggacccttcaacggactcgacaagggggagccggtcaacgaggcagacgccgcggccctcgagcacgacaaggcctacgaccggcagctcgacagcggagacaacccgtacctcaagtacaaccacgccgacgcggagtttcaggagcgtcttaaagaagatacgtcttttgggggcaacctcggacgagcagtcttccaggcgaaaaagagggttcttgaacctctgggcctggttgaggaacctgttaagacggctccgggaaaaaagaggccggtagagcactctcctgtggagccagactcctcctcgggaaccggaaaggcgggccagcagcctgcaagaaaaagattgaatttcggtcagactggagacgcagactccgtacctgacccccagcctctcggacagccaccagcagccccctctggtctgggaactaatacgatggctacaggcagtggcgcaccaatggcagacaataacgagggcgccgacggagtgggtaattcctcgggaaattggcattgcgattccacatggatgggcgacagagtcatcaccaccagcacccgcacctgggctctgcccacctacaacaaccatctgtacaagcaaatttccagccaatcaggagcatcgaacgacaaccactactttggctacagcaccccctgggggtattttgacttcaacagattccactgccacttttcgccacgtgactggcaaagactcatcaacaacaactggggattccggcccaagagactcagcttcaagctctttaacattcaagtcaaggaggtcacgcagaatgacggtacgacgacgattgccaataaccttaccagcacggttcaggtctttactgactcggagtaccagctcccgtacgtcctcggctcggcgcatcaaggatgcctcccgccgttcccagcagacgtcttcatggtgccacagtatggatacctcaccctgaacaacgggagtcaggcggtaggacgctcttcattttactgcctggagtacttcccttctcagatgcttcgcacgggaaacaactttaccttcagctacacctttgaggacgtgccttttcacagcagctacgctcacagccaaagtctggaccgtctcatgaatcctctcatcgaccaatacctgtattacttgagcaaaacaaacgctccaagcggaaccaccacgatgtccaggcttcagttttctcaggccggagcgagtgacattcgggaccagtctagaaactggcttcctggaccctgttaccgccagcagcgagtatcaaagacagctgcggacaacaacaacagtgattactcgtggactggagctaccaagtaccacctcaatggaagagactctctggtgaacccgggcccagctatggccagccacaaggatgatgaagaaaaatattttcctcagagcggggttctcatcttcgggaaacaaggctcaaataaaactaatgtggacattgaaaaggttatgattacagacgaagaggaaatcaggaccaccaatcccgtggctacggagcagtatggttctgtatctaccaaccttcaaagcggcaacacacaagcagctacctcagatgtcaacacacaaggcgttcttcctggcatggtctggcaggacagagatgtgtacctgcaggggcccatctgggcaaagattcctcacacggacggacactttcacccttctcccctcatgggcggatttggattgaagtaccctcccccacagattctcatcaagaataccccggtacctgcgaatccttcgaccaccttcagtgcggcaaagtttgcttccttcatcacacagtattccacgggacaggtcagcgtggagatagagtgggagctgcagaaggagaacagcaaacgctggaaccccgagatccagtatacttccaactacaacaaatctgttaatgtggactttactgtggacactaatggtgtgtattcagagcctcgccccattggcaccagatacctgactcgtaatctgtaa

SEQ ID NO: 3494 - DNA, 2208 bp, Artificial Sequence
  source: /note="Description of Artificial Sequence: Synthetic polynucleotide"
atggctgccgatggttatcttccagattggctcgaggacactctctctgaaggaataagacagtggtggaagctcaaacctggcccaccaccgccaaagcccgcagagcggcataaggacgacagcaggggtcttgtgcttcctgggtacaagtacctcggacccttcaacggactcgacaagggggagccggtcaacgaggcagacgccgcggccctcgagcacgacaaggcctacgaccggcagctcgacagcggagacaacccgtacctcaagtacaaccacgccgacgcggagtttcaggagcgtcttaaagaagatacgtcttttgggggcaacctcggacgagcagtcttccaggcgaaaaagagggttcttgaacctctgggcctggttgaggaacctgttaagacggctccgggaaaaaagaggccggtagagcactctcctgtggagccagactcctcctcgggaaccggaaaggcgggccagcagcctgcaagaaaaagattgaatttcggtcagactggagacgcagactccgtacctgacccccagcctctcggacagccaccagcagccccctctggtctgggaactaatacgatggctacaggcagtggcgcaccaatggcagacaataacgagggcgccgacggagtgggtaattcctcgggaaattggcattgcgattccacatggatgggcgacagagtcatcaccaccagcacccgcacctgggctctgcccacctacaacaaccatctgtacaagcaaatttccggccaatcaggagcatcgaacgacaaccactactttggctacagcaccccctgggggtattttgacttcaacagattccactgccacttttcgccacgtgactggcaaagactcatcaacaacaactggggattccggcccaagagactcagcttcaagctctttaacattcaagtcaaggaggtcacgcagaatgacggtacgacgacgattgccaataaccttaccagcacggttcaggtctttactgactcggagtaccagctcccgtacgtcctcggctcggcgcatcaaggatgcctcccgccgttcccagcagacgtcttcatggtgccacagtatggatacctcaccctgaacaacgggagtcaggcggtaggacgctcttcattttactgcctggagtacttcccttctcagatgcttcgcacgggaaacaactttaccttcagctacacctttgaggacgtgccttttcacagcagctacgctcacagccaaagtctggaccgtctcatgaatcctctcatcgaccaatacctgtattacttgagcaaaacaaacgctccaagcggaaccaccacgatgtccaggcttcagttttctcaggccggagcgagtgacattcgggaccagtctagaaactggcttcctggaccctgttaccgccagcagcgagtatcaaagacagctgcggacaacaacaacagtgattactcgtggactggagctaccaagtaccacctcaatggaagagactctctggtgaacccgggcccagctatggccagccacaaggatgatgaagaaaaatattttcctcagagcggggttctcatcttcgggaaacaaggctcaaataaaactaatgtggacattgaaaaggttatgattacagacgaagaggaaatcaggaccaccaatcccgtggctacggagcagtatggttctgtatctaccaaccttcaaagcggcaacacacaagcagctacctcagatgtcaacacacaaggcgttcttcctggcatggtctggcaggacagagatgtgtacctgcaggggcccatctgggcaaagattcctcacacggacggacactttcacccttctcccctcatgggcggatttggattgaagcaccctcccccacagattctcatcaagaataccccggtacctgcgaatccttcgaccaccttcagtgcggcaaagtttgcttccttcatcacacagtattccacgggacaggtcagcgtggagatagagtgggagctgcagaaggagaacagcaaacgctggaaccccgagatccagtatacttccaactacaacaaatctgttaatgtggactttactgtggacactaatggtgtgtattcagagcctcgccccattggcaccagatacctgactcgtaatctgtaa

SEQ ID NO: 3495 - DNA, 2208 bp, Artificial Sequence
  source: /note="Description of Artificial Sequence: Synthetic polynucleotide"
atggctgccgatggttatcttccagattggctcgaggacactctctctgaaggaataagacagtggtggaagctcaaacctggcccaccaccgccaaagcccgcagagcggcataaggacgacagcaggggtcttgtgcttcctgggtacaagtacctcggacccttcaacggactcgacaagggggagccggtcaacgaggcagacgccgcggccctcgagcacgacaaggcctacgaccggcagctcgacagcggagacaacccgtacctcaagtacaaccacgccgacgcggagtttcaggagcgtcttaaagaagatacgtcttttgggggcaacctcggacgagcagtcttccaggcgaaaaagagggttcttgaacctctgggcctggttgaggaacctgttaagacggctccgggaaaaaagaggccggtagagcactctcctgtggagccagactcctcctcgggaaccggaaaggcgggccagcagcctgcaagaaaaagattgaatttcggtcagactggagacgcagactccgtacctgacccccagcctctcggacagccaccagcagccccctctggtctgggaactaatacgatggctacaggcagtggcgcaccaatggcagacaataacgagggcgccgacggagtgggtaattcctcgggaaattggcattgcgattccacatggatgggcgacagagtcatcaccaccagcacccgcacctgggctctgcccacctacaacaaccatctgtacaagcaaatttccagccaatcaggagcatcgaacgacaaccactactttggctacagcaccccctgggggtattttgacttcaacagattccactgccacttttcgccacgtgactggcaaagactcatcaacaacaactggggattccggcccaagagactcagcttcaagctctttaacattcaagtcaaggaggtcacgcagaatgacggtacgacgacgattgccaataaccttaccagcacggttcaggtctttactgactcggagtaccggctcccgtacgtcctcggctcggcgcatcaaggatgcctcccgccgttcccagcagacgtcttcatggtgccacagtatggatacctcaccctgaacaacgggagtcaggcggtaggacgctcttcattttactgcctggagtacttcccttctcagatgcttcgcacgggaaacaactttaccttcagctacacctttgaggacgtgccttttcacagcagctacgctcacagccaaagtctggaccgtctcatgaatcctctcatcgaccaatacctgtattacttgagcaaaacaaacgctccaagcggaaccaccacgatgtccaggcttcagttttctcaggccggagcgagtgacattcgggaccagtctagaaactggcttcctggaccctgttaccgccagcagcgagtatcaaagacagctgcggacaacaacaacagtgattactcgtggactggagctaccaagtaccacctcaatggaagagactctctggtgaacccgggcccagctatggccagccacaaggatgatgaagaaaaatattttcctcagagcggggttctcatcttcgggaaacaaggctcaaataaaactaatgtggacattgaaaaggttatgattacagacgaagaggaaatcaggaccaccaatcccgtggctacggagcagtatggttctgtatctaccaaccttcaaagcggcaacacacaagcagctacctcagatgtcaacacacaaggcgttcttcctggcatggtctggcaggacagagatgtgtacctgcaggggcccatctgggcaaagattcctcacacggacggacactttcacccttctcccctcatgggcggatttggattgaagcaccctcccccacagattctcatcaagaataccccggtacctgcgaatccttcgaccaccttcagtgcggcaaagtttgcttccttcatcacacagtattccacgggacaggtcagcgtggagatagagtgggagctgcagaaggagaacagcaaacgctggaaccccgagatccagtatacttccaactacaacaaatctgttaatgtggactttactgtggacactaatggtgtgtattcagagcctcgccccattggcaccagatacctgactcgtaatctgtaa

SEQ ID NO: 3496 - DNA, 2208 bp, Artificial Sequence
  source: /note="Description of Artificial Sequence: Synthetic polynucleotide"
atggctgccgatggttatcttccagattggctcgaggacactctctctgaaggaataagacagtggtggaagctcaaacctggcccaccaccgccaaagcccgcagagcggcataaggacgacagcaggggtcttgtgcttcctgggtacaagtacctcggacccttcaacggactcgacaagggggagccggtcaacgaggcagacgccgcggccctcgagcacgacaaggcctacgaccggcagctcgacagcggagacaacccgtacctcaagtacaaccacgccgacgcggagtttcaggagcgtcttaaagaagatacgtcttttgggggcaacctcggacgagcagtcttccaggcgaaaaagagggttcttgaacctctgggcctggttgaggaacctgttaagacggctccgggaaaaaagaggccggtagagcactctcctgtggagccagactcctcctcgggaaccggaaaggcgggccagcagcctgcaagaaaaagattgaatttcggtcagactggagacgcagactccgtacctgacccccagcctctcggacagccaccagcagccccctctggtctgggaactaatacgatggctacaggcagtggcgcaccaatggcagacaataacgagggcgccgacggagtgggtaattcctcgggaaattggcattgcgattccacatggatgggcgacagagtcatcaccaccagcacccgcacctgggctctgcccacctacaacaaccatctgtacaagcaaatttccagccaatcaggagcatcgaacgacaaccactactttggctacagcaccccctgggggtattttgacttcaacagattccactgccacttttcgccacgtgactggcaaagactcatcaacaacaactggggattccggcccaagagactcagcttcaagctctttaacattcaagtcaaggaggtcacgcagaatgacggtacgacgacgattgccaataaccttaccagcacggttcaggtctttactgactcggagtaccagctcccgtacgtcctcggctcggcgcatcgaggatgcctcccgccgttcccagcagacgtcttcatggtgccacagtatggatacctcaccctgaacaacgggagtcaggcggtaggacgctcttcattttactgcctggagtacttcccttctcagatgcttcgcacgggaaacaactttaccttcagctacacctttgaggacgtgccttttcacagcagctacgctcacagccaaagtctggaccgtctcatgaatcctctcatcgaccaatacctgtattacttgagcaaaacaaacgctccaagcggaaccaccacgatgtccaggcttcagttttctcaggccggagcgagtgacattcgggaccagtctagaaactggcttcctggaccctgttaccgccagcagcgagtatcaaagacagctgcggacaacaacaacagtgattactcgtggactggagctaccaagtaccacctcaatggaagagactctctggtgaacccgggcccagctatggccagccacaaggatgatgaagaaaaatattttcctcagagcggggttctcatcttcgggaaacaaggctcaaataaaactaatgtggacattgaaaaggttatgattacagacgaagaggaaatcaggaccaccaatcccgtggctacggagcagtatggttctgtatctaccaaccttcaaagcggcaacacacaagcagctacctcagatgtcaacacacaaggcgttcttcctggcatggtctggcaggacagagatgtgtacctgcaggggcccatctgggcaaagattcctcacacggacggacactttcacccttctcccctcatgggcggatttggattgaagcaccctcccccacagattctcatcaagaataccccggtacctgcgaatccttcgaccaccttcagtgcggcaaagtttgcttccttcatcacacagtattccacgggacaggtcagcgtggagatagagtgggagctgcagaaggagaacagcaaacgctggaaccccgagatccagtatacttccaactacaacaaatctgttaatgtggactttactgtggacactaatggtgtgtattcagagcctcgccccattggcaccagatacctgactcgtaatctgtaa

SEQ ID NO: 3497 - DNA, 2208 bp, Artificial Sequence
  source: /note="Description of Artificial Sequence: Synthetic polynucleotide"
atggctgccgatggttatcttccagattggctcgaggacactctctctgaaggaataagacagtggtggaagctcaaacctggcccaccaccgccaaagcccgcagagcggcataaggacgacagcaggggtcttgtgcttcctgggtacaagtacctcggacccttcaacggactcgacaagggggagccggtcaacgaggcagacgccgcggccctcgagcacgacaaggcctacgaccggcagctcgacagcggagacaacccgtacctcaagtacaaccacgccgacgcggagtttcaggagcgtcttaaagaagatacgtcttttgggggcaacctcggacgagcagtcttccaggcgaaaaagagggttcttgaacctctgggcctggttgaggaacctgttaagacggctccgggaaaaaagaggccggtagagcactctcctgtggagccagactcctcctcgggaaccggaaaggcgggccagcagcctgcaagaaaaagattgaatttcggtcagactggagacgcagactccgtacctgacccccagcctctcggacagccaccagcagccccctctggtctgggaactaatacgatggctacaggcagtggcgcaccaatggcagacaataacgagggcgccgacggagtgggtaattcctcgggaaattggcattgcgattccacatggatgggcgacagagtcatcaccaccagcacccgcacctgggctctgcccacctacaacaaccatctgtacaagcaaatttccagccaatcaggagcatcgaacgacaaccactactttggctacagcaccccctgggggtattttgacttcaacagattccactgccacttttcgccacgtgactggcaaagactcatcaacaacaactggggattccggcccaagagactcagcttcaagctctttaacattcaagtcaaggaggtcacgcagaatgacggtacgacgacgattgccaataaccttaccagcacggttcaggtctttactgactcggagtaccagctcccgtacgtcctcggctcggcgcatcaaggatgcctcccgccgttcccagcagacgtcttcatggtgccacagtatggatacctcaccctgaacaacgggagtcaggcggtaggacgctcttcattttactgcctggagtacttcccttctcagatgcttcgcgcgggaaacaactttaccttcagctacacctttgaggacgtgccttttcacagcagctacgctcacagccaaagtctggaccgtctcatgaatcctctcatcgaccaatacctgtattacttgagcaaaacaaacgctccaagcggaaccaccacgatgtccaggcttcagttttctcaggccggagcgagtgacattcgggaccagtctagaaactggcttcctggaccctgttaccgccagcagcgagtatcaaagacagctgcggacaacaacaacagtgattactcgtggactggagctaccaagtaccacctcaatggaagagactctctggtgaacccgggcccagctatggccagccacaaggatgatgaagaaaaatattttcctcagagcggggttctcatcttcgggaaacaaggctcaaataaaactaatgtggacattgaaaaggttatgattacagacgaagaggaaatcaggaccaccaatcccgtggctacggagcagtatggttctgtatctaccaaccttcaaagcrgcaacacacaagcagctacctcagatgtcaacacacaaggcgttcttcctggcatggtctggcaggacagagatgtgtacctgcaggggcccatctgggcaaagattcctcacacggacggacactttcacccttctcccctcatgggcggatttggattgaagcaccctcccccacagattctcatcaagaataccccggtacctgcgaatccttcgaccaccttcagtgcggcaaagtttgcttccttcatcacacagtattccacgggacaggtcagcgtggagatagagtgggagctgcagaaggagaacagcaaacgctggaaccccgagatccagtatacttccaactacaacaaatctgttaatgtggactttactgtggacactaatggtgtgtattcagagcctcgccccattggcaccagatacctgactcgtaatctgtaa

SEQ ID NO: 3498 - DNA, 2208 bp, Artificial Sequence
  source: /note="Description of Artificial Sequence: Synthetic polynucleotide"
atggctgccgatggttatcttccagattggctcgaggacactctctctgaaggaataagacagtggtggaagctcaaacctggcccaccaccgccaaagcccgcagagcggcataaggacgacagcaggggtcttgtgcttcctgggtacaagtacctcggacccttcaacggactcgacaagggggagccggtcaacgaggcagacgccgcggccctcgagcacgacaaggcctacgaccggcagctcgacagcggagacaacccgtacctcaagtacaaccacgccgacgcggagtttcaggagcgtcttaaagaagatacgtcttttgggggcaacctcggacgagcagtcttccaggcgaaaaagagggttcttgaacctctgggcctggttgaggaacctgttaagacggctccgggaaaaaagaggccggtagagcactctcctgtggagccagactcctcctcgggaaccggaaaggcgggccagcagcctgcaagaaaaagattgaatttcggtcagactggagacgcagactccgtacctgacccccagcctctcggacagccaccagcagccccctctggtctgggaactaatacgatggctacaggcagtggcgcaccaatggcagacaataacgagggcgccgacggagtgggtaattcctcgggaaattggcattgcgattccacatggatgggcgacagagtcatcaccaccagcacccgcacctgggctctgcccacctacaacaaccatctgtacaagcaaatttccagccaatcaggagcatcgaacgacaaccactactttggctacagcaccccctgggggtattttgacttcaacagattccactgccacttttcgccacgtgactggcaaagactcatcaacaacaactggggattccggcccaagagactcggcttcaagctctttaacattcaagtcaaggaggtcacgcagaatgacggtacgacgacgattgccaataaccttaccagcacggttcaggtctttactgactcggagtaccagctcccgtacgtcctcggctcggcgcatcaaggatgcctcccgccgttcccagcagacgtcttcatggtgccacagtatggatacctcaccctgaacaacgggagtcaggcggtaggacgctcttcattttactgcctggagtacttcccttctcagatgcttcgcacgggaaacaactttaccttcagctacacctttgaggacgtgccttttcacagcagctacgctcacagccaaagtctggaccgtctcatgaatcctctcatcgaccaatacctgtattacttgagcaaaacaaacgctccaagcggaaccaccacgatgtccaggcttcagttttctcaggccggagcgagtgacattcgggaccagtctagaaactggcttcctggaccctgttaccgccagcagcgagtatcaaagacagctgcggacaacaacaacagtgattactcgtggactggagctaccaagtaccacctcaatggaagagactctctggtgaacccgggcccagctatggccagccacaaggatgatgaagaaaaatattttcctcagagcggggttctcatcttcgggaaacaaggctcaaataaaactaatgtggacattgaaaaggttatgattacagacgaagaggaaatcaggaccaccaatcccgtggctacggagcagtatggttctgtatctaccaaccttcaaagcggcaacacacaagcagctacctcagatgtcaacacacaaggcgttcttcctggcatggtctggcaggacagagatgtgtacctgcaggggcccatctgggcaaagattcctcacacggacggacactttcacccttctcccctcatgggcggatttggattgaagcaccctcccccacagattctcatcaagaataccccggtacctgcgaatccttcgaccaccttcagtgcggcaaagtttgcttccttcatcacacagtattccacgggacaggtcagcgtggagatagagtgggagctgcagaaggagaacagcaaacgctggaaccccgagatccagtatacttccaactacaacaaatctgttaatgtggactttactgtggacactaatggtgtgtattcagagcctcgccccattggcaccagatacctgactcgtaatctgtaa

SEQ ID NO: 3499 - DNA, 2208 bp, Artificial Sequence
  source: /note="Description of Artificial Sequence: Synthetic polynucleotide"
atggctgccgatggttatcttccagattggctcgaggacactctctctgaaggaataagacagtggtggaagctcaaacctggcccaccaccgccaaagcccgcagagcggcataaggacgacagcaggggtcttgtgcttcctgggtacaagtacctcggacccttcaacggactcgacaagggggagccggtcaacgaggcagacgccgcggccctcgagcacgacaaggcctacgaccggcagctcgacagcggagacaacccgtacctcaagtacaaccacgccgacgcggagtttcaggagcgtcttaaagaagatacgtcttttgggggcaacctcggacgagcagtcttccaggcgaaaaagagggttcttgaacctctgggcctggttgaggaacctgttaagacggctccgggaaaaaagaggccggtagagcactctcctgtggagccagactcctcctcgggaaccggaaaggcgggccagcagcctgcaagaaaaagattgaatttcggtcagactggagacgcagactccgtacctgacccccagcctctcggacagccaccagcagccccctctggtctgggaactaatacgatggctacaggcagtggcgcaccaatggcagacaataacgagggcgccgacggagtgggtaattcctcgggaaattggcattgcgattccacatggatgggcgacagagtcatcaccaccagcacccgcacctgggctctgcccacctacaacaaccatctgtacaagcaaatttccagccaatcaggagtatcgaacgacaaccactactttggctacagcaccccctgggggtattttgacttcaacagattccactgccacttttcgccacgtgactggcaaagactcatcaacaacaactggggattccggcccaagagactcagcttcaagctctttaacattcaagtcaaggaggtcacgcagaatgacggtacgacgacgattgccaataaccttaccagcacggttcaggtctttactgactcggagtaccagctcccgtacgtcctcggctcggcgcatcaaggatgcctcccgccgttcccagcagacgtcttcatggtgccacagtatggatacctcaccctgaacaacgggagtcaggcggtaggacgctcttcattttactgcctggagtacttcccttctcagatgcttcgcacgggaaacaactttaccttcagctacacctttgaggacgtgccttttcacagcagctacgctcacagccaaagtctggaccgtctcatgaatcctctcatcgaccaatacctgtattacttgagcaaaacaaacgctccaagcggaaccaccacgatgtccaggcttcagttttctcaggccggagcgagtgacattcgggaccagtctagaaactggcttcctggaccctgttaccgccagcagcgagtatcaaagacagctgcggacaacaacaacagtgattactcgtggactggagctaccaagtaccacctcaatggaagagactctctggtgaacccgggcccagctatggccagccacaaggatgatgaagaaaaatattttcctcagagcggggttctcatcttcgggaaacaaggctcaaataaaactaatgtggacattgaaaaggttatgattacagacgaagaggaaatcaggaccaccaatcccgtggctacggagcagtatggttctgtatctaccaaccttcaaagcggcaacacacaagcagctacctcagatgtcaacacacaaggcgttcttcctggcatggtctggcaggacagagatgtgtacctgcaggggcccatctgggcaaagattcctcacacggacggacactttcacccttctcccctcatgggcggatttggattgaagcaccctcccccacagattctcatcaagaataccccggtacctgcgaatccttcgaccaccttcagtgcggcaaagtttgcttccttcatcacacagtattccacgggacaggtcagcgtggagatagagtgggagctgcagaaggagaacagcaaacgctggaaccccgagatccagtatacttccaactacaacaaatctgttaatgtggactttactgtggacactaatggtgtgtattcagagcctcgccccattggcaccagatacctgactcgtaatctgtaa

SEQ ID NO: 3500 - DNA, 2208 bp, Artificial Sequence
  source: /note="Description of Artificial Sequence: Synthetic polynucleotide"
atggctgccgatggttatcttccagattggctcgaggacactctctctgaaggaataagacagtggtggaagctcaaacctggcccaccaccgccaaagcccgcagagcggcataaggacgacagcaggggtcttgtgcttcctgggtacaagtacctcggacccttcaacggactcgacaagggggagccggtcaacgaggcagacgccgcggccctcgagcacgacaaggcctacgaccggcagctcgacagcggagacaacccgtacctcaagtacaaccacgccgacgcggagtttcaggagcgtcttaaagaagatacgtcttttgggggcaacctcggacgagcagtcttccaggcgaaaaagagggttcttgaacctctgggcctggttgaggaacctgttaagacggctccgggaaaaaagaggccggtagagcactctcctgtggagccagactcctcctcgggaaccggaaaggcgggccagcagcctgcaagaaaaagattgaatttcggtcagactggagacgcagactccgtacctgacccccagcctctcggacagccaccagcagccccctctggtctgggaactaatacgatggctacaggcagtggcgcaccaatggcagacaataacgagggcgccgacggagtgggtaattcctcgggaaattggcattgcgattccacatggatgggcgacagagtcatcaccaccagcacccgcacctgggctctgcccacctacaacaaccatctgtacaagcaaatttccagccaatcaggagcatcgaacgacaaccactactttggctacagcaccccctgggggtattttgacttcaacagattccactgccacttttcgccacgtgactggcaaagactcatcaacaacaactggggattccggcccaagagactcagcttcaagctctttaacattcaagtcaaggaggtcacgcagaatgacggtacgacgacgattgccaataaccttaccagcacggttcaggtctttactgactcggagtaccagctcccgtacgtcctcggctcggcgcatcaaggatgcctcccgccgttcccagcagacgtcttcatggtgccacagtatggatacctcaccctgaacaacgggagtcaggcggtaggacgctcttcattttactgcctggagtacttcccttctcagatgcttcgcacgggaaacaactttaccttcagctacacctttgaggacgtgccttttcacagcagctacgctcacagccaaagtctggaccgtctcatgaatcctctcatcgaccaatacctgtattacttgagcaaaacaaacgctccaagcggaaccaccacgatgtccaggcttcagttttctcaggccggagcgagtgacattcgggaccagtctagaaactggcttcctggaccctgttaccgccagcagcgagtatcaaagacagctgcggacaacaacaacagtgattactcgtggactggagctaccaagtaccacctcaatggaagagactctctggtgaacccgggcccagctatggccagccacaaggatgatgaagaaaaatattttcctcagagcggggttctcatcttcgggaaacaaggctcaaataaaactaatgtggacattgaaaaggttatgattacagacgaagaggaaatcaggaccaccaatcccatggctacggagcagtatggttctgtatctaccaaccttcaaagcggcaacacacaagcagctacctcagatgtcaacacacaaggcgttcttcctggcatggtctggcaggacagagatgtgtacctgcaggggcccatctgggcaaagattcctcacacggacggacactttcacccttctcccctcatgggcggatttggattgaagcaccctcccccacagattctcatcaagaataccccggtacctgcgaatccttcgaccaccttcagtgcggcaaagtttgcttccttcatcacacagtattccacgggacaggtcagcgtggagatagagtgggagctgcagaaggagaacagcaaacgctggaaccccgagatccagtatacttccaactacaacaaatctgttaatgtggactttactgtggacactaatggtgtgtattcagagcctcgccccattggcaccagatacctgactcgtaatctgtaa

SEQ ID NO: 3501 - DNA, 2208 bp, Artificial Sequence
  source: /note="Description of Artificial Sequence: Synthetic polynucleotide"
atggctgccgatggttatcttccagattggctcgaggacactctctctgaaggaataagacagtggtggaagctcaaacctggcccaccaccgccaaagcccgcagagcggcataaggacgacagcaggggtcttgtgcttcctgggtacaagtacctcggacccttcaacggactcgacaagggggagccggtcaacgaggcagacgccgcggccctcgagcacgacaaggcctacgaccggcagctcgacagcggagacaacccgtacctcaagtacaaccacgccgacgcggagtttcaggagcgtcttaaagaagatacgtcttttgggggcaacctcggacgagcagtcttccaggcgaaaaagagggttcttgaacctctgggcctggttgaggaacctgttaagacggctccgggaaaaaagaggccgatagagcactctcctgtggagccagactcctcctcgggaaccggaaaggcgggccagcagcctgcaagaaaaagattgaatttcggtcagactggagacgcagactccgtacctgacccccagcctctcggacagccaccagcagccccctctggtctgggaactaatacgatggctacaggcagtggcgcaccaatggcagacaataacgagggcgccgacggagtgggtaattcctcgggaaattggcattgcgattccacatggatgggcgacagagtcatcaccaccagcacccgcacctgggctctgcccacctacaacaaccatctgtacaagcaaatttccagccaatcaggagcatcgaacgacaaccactactttggctacagcaccccctgggggtattttgacttcaacagattccactgccacttttcgccacgtgactggcaaagactcatcaacaacaactggggattccggcccaagagactcagcttcaagctctttaacattcaagtcaaggaggtcacgcagaatgacggtacgacgacgattgccaataaccttaccagcacggttcaggtctttactgactcggagtaccagctcccgtacgtcctcggctcggcgcatcaaggatgcctcccgccgttcccagtagacgtcttcatggtgccacagtatggatacctcaccctgaacaacgggagtcaggcggtaggacgctcttcattttactgcctggagtacttcccttctcagatgcttcgcacgggaaacaactttaccttcagctacacctttgaggacgtgccttttcacagcagctacgctcacagccaaagtctggaccgtctcatgaatcctctcatcgaccaatacctgtattacttgagcaaaacaaacgctccaagcggaaccaccacgatgtccaggcttcagttttctcaggccggagcgagtgacattcgggaccagtctagaaactggcttcctggaccctgttaccgccagcagcgagtatcaaagacagctgcggacaacaacaacagtgattactcgtggactggagctaccaagtaccacctcaatggaagagactctctggtgaacccgggcccagctatggccagccacaaggatgatgaagaaaaatattttcctcagagcggggttctcatcttcgggaaacaaggctcaaataaaactaatgtggacattgaaaaggttatgattacagacgaagaggaaatcaggaccaccaatcccgtggctacggagcagtatggttctgtatctaccaaccttcaaagcggcaacacacaagcagctacctcagatgtcaacacacaaggcgttcttcctggcatggtctggcaggacagagatgtgtacctgcaggggcccatctgggcaaagattcctcacacggacggacactttcacccttctcccctcatgggcggatttggattgaagcaccctcccccacagattctcatcaagaataccccggtacctgcgaatccttcgaccaccttcagtgcggcaaagtttgcttccttcatcacacagtattccacgggacaggtcagcgtggagatagagtgggagctgcagaaggagaacagcaaacgctggaaccccgagatccagtatacttccaactacaacaaatctgttaatgtggactttactgtggacactaatggtgtgtattcagagcctcgccccattggcaccagatacctgactcgtaatctgtaa

SEQ ID NO: 3502 - DNA, 2208 bp, Artificial Sequence
  source: /note="Description of Artificial Sequence: Synthetic polynucleotide"
atggctgccgatggttatcttccagattggctcgaggacactctctctgaaggaataagacagtggtggaagctcaaacctggcccaccaccgccaaagcccgcagagcggcataaggacgacagcaggggtcttgtgcttcctgggtacaagtacctcggacccttcaacggactcgacaagggggagccggtcaacgaggcagacgccgcggccctcgagcacgacaaggcctacgaccggcagctcgacagcggagacaacccgtacctcaagtacaaccacgccgacgcggagtttcaggagcgtcttaaagaagatacgtcttttgggggcaacctcggacgagcagtcttccaggcgaaaaagagggttcttgaacctctgggcctggttgaggaacctgttaagacggctccgggaaaaaagaggccggtagagcactctcctgtggagccagactcctcctcgggaaccggaaaggcgggccagcagcctgcaagaaaaagattgaatttcggtcagactggagacgcagactccgtacctgacccccagcctctcggacagccaccagcagccccctctggtctgggaactaatacgatgactacaggcagtggcgcaccaatggcagacaataacgagggcgccgacggagtgggtaattcctcgggaaattggcattgcgattccacatggatgggcgacagagtcatcaccaccagcacccgcacctgggctctgcccacctacaacaaccatctgtacaagcaaatttccagccaatcaggagcatcgaacgacaaccactactttggctacagcaccccctgggggtattttgacttcaacagattccactgccacttttcgccacgtgactggcaaagactcatcaacaacaactggggattccggcccaagagactcagcttcaagctctttaacattcaagtcaaggaggtcacgcagaatgacggtacgacgacgattgccaataaccttaccagcacggttcaggtctttactgactcggagtaccagctcccgtacgtcctcggctcggcgcatcaaggatgcctcccgccgttcccagcagacgtcttcatggtgccacagtatggatacctcaccctgaacaacgggagtcaggcggtaggacgctcttcattttactgcctggagtacttcccttctcagatgcttcgcacgggaaacaactttaccttcagctacacctttgaggacgtgccttttcacagcagctacgctcacagccaaagtctggaccgtctcatgaatcctctcatcgaccaatacctgtattacttgagcaaaacaaacgctccaagcggaaccaccacgatgtccaggcttcagttttctcaggccggagcgagtgacattcgggaccagtctagaaactggcttcctggaccctgttaccgccagcagcgagtatcaaagacagctgcggacaacaacaacagtgattactcgtggactggagctaccaagtaccacctcaatggaagagactctctggtgaacccgggcccagctatggccagccacaaggatgatgaagaaaaatattttcctcagagcggggttctcatcttcgggaaacaaggctcaaataaaactaatgtggacattgaaaaggttatgattacagacgaagaggaaatcaggaccaccaatcccgtggctacggagcagtatggttctgtatctaccaaccttcaaagcggcaacacacaagcagctacctcagatgtcaacacacaaggcgttcttcctggcatggtctggcaggacagagatgtgtacctgcaggggcccatctgggcaaagattcctcacacggacggacactttcacccttctcccctcatgggcggatttggattgaagcaccctcccccacagattctcatcaagaataccccggtacctgcgaatccttcgaccaccttcagtgcggcaaagtttgcttccttcatcacacagtattccacgggacaggtcagcgtggagatagagtgggagctgcagaaggagaacagcaaacgctggaaccccgagatccagtatacttccaactacaacaaatctgttaatgtggactttactgtggacactaatggtgtgtattcagagcctcgccccattggcaccagatacctgactcgtaatctgtaa

SEQ ID NO: 3503 - DNA, 2208 bp, Artificial Sequence
  source: /note="Description of Artificial Sequence: Synthetic polynucleotide"
atggctgccgatggttatcttccagattggctcgaggacactctctctgaaggaataagacagtggtggaagctcaaacctggcccaccaccgccaaagcccgcagagcggcataaggacgacagcaggggtcttgtgcttcctgggtacaagtacctcggacccttcaacggactcgacaagggggagccggtcaacgaggcagacgccgcggccctcgagcacgacaaggcctacgaccggcagctcgacagcggagacaacccgtacctcaagtacaaccacgccgacgcggagtttcaggagcgtcttaaagaagatacgtcttttgggggcaacctcggacgagcagtcttccaggcgaaaaagagggttcttgaacctctgggcctggttgaggaacctgttaagacggctccgggaaaaaagaggtcggtagagcactctcctgtggagccagactcctcctcgggaaccggaaaggcgggccagcagcctgcaagaaaaagattgaatttcggtcagactggagacgcagactccgtacctgacccccagcctctcggacagccaccagcagccccctctggtctgggaactaatacgatggctacaggcagtggcgcaccaatggcagacaataacgagggcgccgacggagtgggtaattcctcgggaaattggcattgcgattccacatggatgggcgacagagtcatcaccaccagcacccgcacctgggctctgcccacctacaacaaccatctgtacaagcaaatttccagccaatcaggagcatcgaacgacaaccactactttggctacagcaccccctgggggtattttgacttcaacagattccactgccacttttcgccacgtgactggcaaagactcatcaacaacaactggggattccggcccaagagactcagcttcaagctctttaacattcaagtcaaggaggtcacgcagaatgacggtacgacgacgattgccaataaccttaccagcacggttcaggtctttactgactcggagtaccagctcccgtacgtcctcggctcggcgcatcaaggatgcctcccgccgttcccagcagacgtcttcatggtgccacagtatggatacctcaccctgaacaacgggagtcaggcggtaggacgctcttcattttactgcctggagtacttcccttctcagatgcttcgcacgggaaacaactttaccttcagctacacctttgaggacgtgccttttcacagcagctacgctcacagccaaagtctggaccgtctcatgaatcctctcatcgaccaatacctgtattacttgagcaaaacaaacgctccaagcggaaccaccacgatgtccaggcttcagttttctcaggccggagcgagtgacattcgggaccagtctagaaactggcttcctggaccctgttaccgccagcagcgagtatcaaagacagctgcggacaacaacaacagtgattactcgtggactggagctaccaagtaccacctcaatggaagagactctctggtgaacccgggcccagctatggccagccacaaggatgatgaagaaaaatattttcctcagagcggggttctcatcttcgggaaacaaggctcaaataaaactaatgtggacattgaaaaggttatgattacagacgaagaggaaatcaggaccaccaatcccgtggctacggagcagtatggttctgtatctaccaaccttcaaagcggcaacacacaagcagctacctcagatgtcaacacacaaggcgttcttcctggcatggtctggcaggacagagatgtgtacctgcaggggcccatctgggcaaagattcctcacacggacggacactttcacccttctcccctcatgggcggatttggattgaagcaccctcccccacagattctcatcaagaataccccggtacctgcgaatccttcgaccaccttcagtgcggcaaagtttgcttccttcatcacacagtattccacgggacaggtcagcgtggagatagagtgggagctgcagaaggagaacagcaaacgctggaaccccgagatccagtatacttccaactacaacaaatctgttaatgtggactttactgtggacactaatggtgtgtattcagagcctcgccccattggcaccagatacctgactcgtaatctgtaa

SEQ ID NO: 3504 - DNA, 2208 bp, Artificial Sequence
  source: /note="Description of Artificial Sequence: Synthetic polynucleotide"
atggctgccgatggttatcttccagattggctcgaggacactctctctgaaggaataagacagtggtggaagctcaaacctggcccaccaccgccaaagcccgcagagcggcataaggacgacagcaggggtcttgtgcttcctgggtacaagtacctcggacccttcaacggactcgacaagggggagccggtcaacgaggcagacgccgcggccctcgagcacgacaaggcctacgaccggcagctcgacagcggagacaacccgtacctcaagtacaaccacgccgacgcggagtttcaggagcgtcttaaagaagatacgtcttttgggggcaacctcggacgagcagtcttccaggcgaaaaagagggttcttgaacctctgggcctggttgaggaacctgttaagacggctccgggaaaaaagaggccggtagagcactctcctgtggagccagactcctcctcgggaaccggaaaggcgggccagcagcctgcaagaaaaagattgaatttcggtcagactggagacgcagactccgtacctgacccccagcctctcggacagccaccagcagccccctctggtctgggaactaatacgatggctacaggcagtggcgcaccaatggcagacaataacgagggcgccgacggagtgggtaattcctcgggaaattggcattgcgattccacatggatgggcgacagagtcatcaccaccagcacccgcacctgggctctgcccacctacaacaaccatctgtacaagcaaatttccagccaatcaggagcatcgaacgacaaccactactttggctacagcaccccctgggggtattttgacttcaacagattccactgccacttttcgccacgtgactggcaaagactcatcaacaacaactggggattccggcccaagagactcagcttcaagctctttaacattcaagtcaaggaggtcacgcagaatgacggtacgacgacgattgccaataaccttaccagcacggttcaggtctttactgactcggagtaccagctcccgtacgtcctcggctcggcgcatcaaggatgcctcccgccgttcccagcagacgtcttcgtggtgccacagtatggatacctcaccctgaacaacgggagtcaggcggtaggacgctcttcattttactgcctggagtacttcccttctcagatgcttcgcacgggaaacaactttaccttcagctacacctttgaggacgtgccttttcacagcagctacgctcacagccaaagtctggaccgtctcatgaatcctctcatcgaccaatacctgtattacttgagcaaaacaaacgctccaagcggaaccaccacgatgtccaggcttcagttttctcaggccggagcgagtgacattcgggaccagtctagaaactggcttcctggaccctgttaccgccagcagcgagtatcaaagacagctgcggacaacaacaacagtgattactcgtggactggagctaccaagtaccacctcaatggaagagactctctggtgaacccgggcccagctatggccagccacaaggatgatgaagaaaaatattttcctcagagcggggttctcatcttcgggaaacaaggctcaaataaaactaatgtggacattgaaaaggttatgattacagacgaagaggaaatcaggaccaccaatcccgtggctacggagcagtatggttctgtatctaccaaccttcaaagcggcaacacacaagcagctacctcagatgtcaacacacaaggcgttcttcctggcatggtctggcaggacagagatgtgtacctgcaggggcccatctgggcaaagattcctcacacggacggacactttcacccttctcccctcatgggcggatttggattgaagcaccctcccccacagattctcatcaagaataccccggtacctgcgaatccttcgaccaccttcagtgcggcaaagtttgcttccttcatcacacagtattccacgggacaggtcggcgtggagatagagtgggagctgcagaaggagaacagcaaacgctggaaccccgagatccagtatacttccaactacaacaaatctgttaatgtggactttactgtggacactaatggtgtgtattcagagcctcgccccattggcaccagatacctgactcgtaatctgtaa

SEQ ID NO: 3505 - DNA, 2208 bp, Artificial Sequence
  source: /note="Description of Artificial Sequence: Synthetic polynucleotide"
atggctgccgatggttatcttccagattggctcgaggacactctctctgaaggaataagacagtggtggaagctcaaacctggcccaccaccgccaaagcccgcagagcggcataaggacgacagcaggggtcttgtgcttcctgggtacaagtacctcggacccttcaacggactcgacaagggggagccggtcaacgaggcagacgccgcggccctcgagcacgacaaggcctacgaccggcagctcgacagcggagacaacccgtacctcaagtacaaccacgccgacgcggagtttcaggagcgtcttaaagaagatacgtcttttgggggcaacctcggacgagcagtcttccaggcgaaaaagagggttcttgaacctctgggcctggttgaggaacctgttaagacggctccgggaaaaaagaggccggtagagcactctcctgtggagccagactcctcctcgggaaccggaaaggcgggccagcagcctgcaagaaaaagattgaatttcggtcagactggagacgcagactccgtacctgacccccagcctctcggacagccaccagcagccccctctggtctgggaactaatacgatggctacaggcagtggcgcaccaatggcagacaataacgagggcgccgacggagtgggtaattcctcgggaaattggcattgcgattccacatggatgggcgacagagtcatcaccaccagcacccgcacctgggctctgcccacctacaacaaccatctgtacaagcaaatttccagccaatcaggagcatcgaacgacaaccactactttggctacagcaccccctgggggtattttgacttcaacagattccactgccacttttcgccacgtgactggcaaagactcatcaacaacaactggggattccggcccaagagactcagcttcaagctctttaacattcaagtcaaggaggtcacgcagaatgacggtacgacgacgattgccaataaccttaccagcacggttcaggtctttactgactcggagtaccagctcccgtacgtcctcggctcggcgcatcaaggatgcctcccgccgttcccagcagacgtcttcatggtgccacagtatggatacctcaccctgaacaacgggagtcaggcggtaggacgctcttcattttactgcctggagtacttcccttctcagatgcttcgcacgggaaacaactttaccttcagctacacctttgaggacgtgccttttcacagcagctacgctcacagccaaagtctggaccgtctcatgaatcctctcatcgaccaatacctgtattacttgagcaaaacaaacgctccaagcggaaccaccgcgatgtccaggcttcagttttctcaggccggagcgagtgacattcgggaccagtctagaaactggcttcctggaccctgttaccgccagcagcgagtatcaaagacagctgcggacaacaacaacagtgattactcgtggactggagctaccaagtaccacctcaatggaagagactctctggtgaacccgggcccagctatggccagccacaaggatgatgaagaaaaatattttcctcagagcggggttctcatcttcgggaaacaaggctcaaataaaactaatgtggacattgaaaaggttatgattacagacgaagaggaaatcaggaccaccaatcccgtggctacggagcagtatggttctgtatctaccaaccttcaaagcggcaacacacaagcagctacctcagatgtcaacacacaaggcgttcttcctggcatggtctggcaggacagagatgtgtacctgcaggggcccatctgggcaaagattcctcacacggacggacactttcacccttctcccctcatgggcggatttggattgaagcaccctcccccacagattctcatcaagaataccccggtacctgcgaatccttcgaccaccttcagtgcggcaaagtttgcttccttcatcacacagtattccacgggacaggtcagcgtggagatagagtgggagctgcagaaggagaacagcaaacgctggaaccccgagatccagtatacttccaactacaacaaatctgttaatgtggactttactgtggacactaatggtgtgtattcagagcctcgccccattggcaccagatacctgactcgtaatctgtaa

SEQ ID NO: 3506 - DNA, 2208 bp, Artificial Sequence
  source: /note="Description of Artificial Sequence: Synthetic polynucleotide"
atggctgccgatggttatcttccagattggctcgaggacactctctctgaaggaataagacagtggtggaagctcaaacctggcccaccaccgccaaagcccgcagagcggcataaggacgacagcaggggtcttgtgcttcctgggtacaagtacctcggacccttcaacggactcgacaagggggagccggtcaacgaggcagacgccgcggccctcgagcacgacaaggcctacgaccggcagctcgacagcggagacaacccgtacctcaagtacaaccacgccgacgcggagtttcaggagcgtcttaaagaagatacgtcttttgggggcaacctcggacgagcagtcttccaggcgaaaaagagggttcttgaacctctgggcctggttgaggaacctgttaagacggctccgggaaaaaagaggccggtagagcactctcctgtggagccagactcctcctcgggaaccggaaaggcgggccagcagcctgcaagaaaaagattgaatttcggtcagactggagacgcagactccgtacctgacccccagcctctcggacagccaccagcagccccctctggtctgggaactaatacgatggctacaggcagtggcgcaccaatggcagacaataacgagggcgccgacggagtgggtaattcctcgggaaattggcattgcgattccacatggatgggcgacagagtcatcaccaccagcacccgcacctgggctctgcccacctacaacaaccatctgtacaagcaaatttccagccaatcaggagcatcgaacgacaaccactactttggctacagcaccccctgggggtattttgacttcaacagattccactgccacttttcgccacgtgactggcaaagactcatcaacaacaactggggattccggcccaagagactcagcttcaagctctttaacattcaagtcaaggaggtcacgcagaatgacggtacgacgacgattgccaataaccttaccagcacggttcaggtctttactgactcggagtaccagctcccgtacgtcctcggctcggcgcatcaaggatgcctcccgccgttcccagcagacgtcttcatggtgccacagtatggatacctcaccctgaacaacgggagtcaggcggtaggacgctcttcattttactgcctggagtacttcccttctcagatgcttcgcacgggaaacaactttaccttcagctacacctttgaggacgtgccttttcacagcagctacgctcacagccaaagtctggaccgtctcatgaatcctcccatcgaccaatacctgtattacttgagcaaaacaaacgctccaagcggaaccaccacgatgtccaggcttcagttttctcaggccggagcgagtgacattcgggaccagtctagaaactggcttcctggaccctgttaccgccagcagcgagtatcaaagacagctgcggacaacaacaacagtgattactcgtggactggagctaccaagtaccacctcaatggaagagactctctggtgaacccgggcccagctatggccagccacaaggatgatgaagaaaaatattttcctcagagcggggttctcatcttcgggaaacaaggctcaaataaaactaatgtggacattgaaaaggttatgattacagacgaagaggaaatcaggaccaccaatcccgtggctacggagcagtatggttctgtatctaccaaccttcaaagcggcaacacacaagcagctacctcagatgtcaacacacaaggcgttcttcctggcatggtctggcaggacagagatgtgtacctgcaggggcccatctgggcaaagattcctcacacggacggacactttcacccttctcccctcatgggcggatttggattgaagcaccctcccccacagattctcatcaagaataccccggtacctgcgaatccttcgaccaccttcagtgcggcaaagtttgcttccttcatcacacagtattccacgggacaggtcagcgtggagatagagtgggagctgcagaaggagaacagcaaacgctggaaccccgagatccagtatacttccaactacaacaaatctgttaatgtggactttactgtggacactaatggtgtgtattcagagcctcgccccattggcaccagatacctgactcgtaatctgtaa

SEQ ID NO: 3507 - DNA, 2208 bp, Artificial Sequence
  source: /note="Description of Artificial Sequence: Synthetic polynucleotide"
atggctgccgatggttatcttccagattggctcgaggacactctctctgaaggaataagacagtggtggaagctcaaacctggcccaccaccgccaaagcccgcagagcggcataaggacgacagcaggggtcttgtgcttcctgggtacaagtacctcggacccttcaacggactcgacaagggggagccggtcaacgaggcagacgccgcggccctcgagcacgacaaggcctacgaccggcagctcgacagcggagacaacccgtacctcaagtacaaccacgccgacgcggagtttcaggagcgtcttaaagaagatacgtcttttgggggcaacctcggacgagcagtcttccaggcgaaaaagagggttcttgaacctctgggcctggttgaggaacctgttaagacggctccgggaaaaaagaggccggtagagcactctcctgtggagccagactcctcctcgggaaccggaaaggcgggccagcagcctgcaagaaaaagattgaatttcggtcagactggagacgcagactccgtacctgacccccagcctctcggacagccaccagcagccccctctggtctgggaactaatacgatggctacaggcagtggcgcaccaatggcagacaataacgagggcgccgacggagtgggtaattcctcgggaaattggcattgcgattccacatggatgggcgacagagtcatcaccaccagcacccgcacctgggctctgcccacctacaacaaccatctgtacaagcaaatttccagccaatcaggagcatcgaacgacaaccactactttggctacagcaccccctgggggtattttgacttcaacagattccactgccacttttcgccacgtgactggcaaagactcatcaacaacaactggggattccggcccaagagactcagcttcaagctctttaacattcaagtcaaggaggtcacgcagaatgacggtacgacgacgattgccaataaccttaccagcacggttcaggtctttactgactcggagtaccagctcccgtacgtcctcggctcggcgcatcaaggatgcctcccgccgttcccagcagacgtcttcatggtgccacagtatggatacctcaccctgaacaacgggagtcaggcggtaggacgctcttcattttactgcctggagtacttcccttctcagatgcttcgcacgggaaacaactttaccttcagctacacctttgaggacgtgccttttcacagcagctacgctcacggccaaagtctggaccgtctcatgaatcctctcatcgaccaatacctgtattacttgagcaaaacaaacgctccaagcggaaccaccacgatgtccaggcttcagttttctcaggccggagcgagtgacattcgggaccagtctagaaactggcttcctggaccctgttaccgccagcagcgagtatcaaagacagctgcggacaacaacaacagtgattactcgtggactggagctaccaagtaccacctcaatggaagagactctctggtgaacccgggcccagctatggccagccacaaggatgatgaagaaaaatattttcctcagagcggggttctcatcttcgggaaacaaggctcaaataaaactaatgtggacattgaaaaggttatgattacagacgaagaggaaatcaggaccaccaatcccgtggctacggagcagtatggttctgtatctaccaaccttcaaagcggcaacacacaagcagctacctcagatgtcaacacacaaggcgttcttcctggcatggtctggcaggacagagatgtgtacctgcaggggcccatctgggcaaagattcctcacacggacggacactttcacccttctcccctcatgggcggatttggattgaagcaccctcccccacagattctcatcaagaataccccggtacctgcgaatccttcgaccaccttcagtgcggcaaagtttgcttccttcatcacacagtattccacgggacaggtcagcgtggagatagagtgggagctgcagaaggagaacagcaaacgctggaaccccgagatccagtatacttccaactacaacaaatctgttaatgtggactttactgtggacactaatggtgtgtattcagagcctcgccccattggcaccagatacctgactcgtaatctgtaa

SEQ ID NO: 3508 - DNA, 2208 bp, Artificial Sequence
  source: /note="Description of Artificial Sequence: Synthetic polynucleotide"
atggctgccgatggttatcttccagattggctcgaggacactctctctgaaggaataagacagtggtggaagctcaaacctggcccaccaccgccaaagcccgcagagcggcataaggacgacagcaggggtcttgtgcttcctgggtacaagtacctcggacccttcaacggactcgacaagggggagccggtcaacgaggcagacgccgcggccctcgagcacgacaaggcctacgaccggcagctcgacagcggagacaacccgtacctcaagtacaaccacgccgacgcggagtttcaggagcgtcttaaagaagatacgtcttttgggggcaacctcggacgagcagtcttccaggcgaaaaagagggttcttgaacctctgggcctggttgaggaacctgttaagacggctccgggaaaaaagaggccggtagagcactctcctgtggagccagactcctcctcgggaaccggaaaggcgggccagcagcctgcaagaaaaagattgaatttcggtcagactggagacgcagactccgtacctgacccccagcctctcggacagccaccagcagccccctctggtctgggaactaatacgatggctacaggcagtggcgcaccaatggcagacaataacgagggcgccgacggagtgggtaattcctcgggaaattggcattgcgattccacatggatgggcgacagagtcatcaccaccagcacccgcacctgggctctgcccacctacaacaaccatctgtacaagcaaatttccagccaatcaggagcatcgaacgacaaccactactttggctacagcaccccctgggggtattttgacttcaacagattccactgccacttttcgccacgtgactggcaaagactcatcaacaacaactggggattccggcccaagagactcagcttcaagctctttaacattcaagtcaaggaggtcacgcagaatgacggtacgacgacgattgccaataaccttaccagcacggttcaggtctttactgactcggagtaccagctcccgtacgtcctcggctcggcgcatcaaggatgcctcccgccgttcccagcagacgtcttcatggtgccacagtatggatacctcaccctgaacaacgggagtcaggcggtaggacgctcttcattttactgcctggagtacttcccttctcagatgcttcgcacgggaaacaactttaccttcagctacacctttgaggacgtgccttttcacagcagctacgctcacagccaaagtctggaccgtctcatgaatcctctcatcgaccaatacctgtattacttgagcaaaacaaacgctccaagcggaaccaccacgatgtccaggcctcagttttctcaggccggagcgagtgacattcgggaccagtctagaaactggcttcctggaccctgttaccgccagcagcgagtatcaaagacagctgcggacaacaacaacagtgattactcgtggactggagctaccaagtaccacctcaatggaagagactctctggtgaacccgggcccagctatggccagccacaaggatgatgaagaaaaatattttcctcagagcggggttctcatcttcgggaaacaaggctcaaataaaactaatgtggacattgaaaaggttatgattacagacgaagaggaaatcaggaccaccaatcccgtggctacggagcagtatggttctgtatctaccaaccttcaaagcggcaacacacaagcagctacctcagatgtcaacacacaaggcgttcttcctggcatggtctggcaggacagagatgtgtacctgcaggggcccatctgggcaaagattcctcacacggacggacactttcacccttctcccctcatgggcggatttggattgaagcaccctcccccacagattctcatcaagaataccccggtacctgcgaatccttcgaccaccttcagtgcggcaaagtttgcttccttcatcacacagtattccacgggacaggtcagcgtggagatagagtgggagctgcagaaggagaacagcaaacgctggaaccccgagatccagtatacttccaactacaacaaatctgttaatgtggactttactgtggacactaatggtgtgtattcagagcctcgccccattggcaccagatacctgactcgtaatctgtaa

SEQ ID NO: 3509 - DNA, 2208 bp, Artificial Sequence
  source: /note="Description of Artificial Sequence: Synthetic polynucleotide"
atggctgccgatggttatcttccagattggctcgaggacactctctctgaaggaataagacagtggtggaagctcaaacctggcccaccaccgccaaagcccgcagagcggcataaggacgacagcaggggtcttgtgcttcctgggtacaagtacctcggacccttcaacggactcgacaagggggagccggtcaacgaggcagacgccgcggccctcgagcacgacaaggcctacgaccggcagctcgacagcggagacaacccgtacctcaagtacaaccacgccgacgcggagtttcaggagcgtcttaaagaagatacgtcttttgggggcaacctcggacgagcagtcttccaggcgaaaaagagggttcttgaacctctgggcctggttgaggaacctgttaagacggctccgggaaaaaagaggccggtagagcactctcctgtggagccagactcctcctcgggaaccggaaaggcgggccagcagcctgcaagaaaaagattgaatttcggtcagactggagacgcagactccgtacctgacccccagcctctcggacagccaccagcagccccctctggtctgggaactaatacgatggctacaggcagtggcgcaccaatggcagacaataacgagggcgccgacggagtgggtaattcctcgggaaattggcattgcgattccacatggatgggcgacagagtcatcaccaccagcacccgcacctgggctctgcccacctacaacaaccatctgtacaagcaaatttccagccaatcaggaacatcgaacgacaaccactactttggctacagcaccccctgggggtattttgacttcaacagattccactgccacttttcgccacgtgactggcaaagactcatcaacaacaactggggattccggcccaagagactcagcttcaagctctttaacattcaagtcaaggaggtcacgcagaatgacggtacgacgacgattgccaataaccttaccagcacggttcaggtctttactgactcggagtaccagctcccgtacgtcctcggctcggcgcatcaaggatgcctcccgccgttcccagcagacgtcttcatggtgccacagtatggatacctcaccctgaacaacgggagtcaggcggtaggacgctcttcattttactgcctggagtacttcccttctcagatgcttcgcacgggaaacaactttaccttcagctacacctttgaggacgtgccttttcacagcagctacgctcacagccaaagtctggaccgtctcatgaatcctctcatcgaccaatacctgtattacttgagcaaaacaaacgctccaagcggaaccaccacgatgtccaggcttcagttttctcaggccggagcgagtgacattcgggaccagtctagaaactggcttcctggaccctgttaccgccagcagcgagtatcaaagacagctgcggacaacaacaacagtgattactcgtggactggagctaccaagtaccacctcaatggaagagactctctggtgaacccgggcccagctatggccagccacaaggatgatgaagaaaaatattttcctcagagcggggttctcatcttcgggaaacaaggctcaaataaaactaatgtggacattgaaaaggttatgattacagacgaagaggaaatcaggaccaccaatcccgtggctacggagcagtatggttctgtatctaccaaccttcaaagcggcaacacacaagcagctacctcagatgtcaacacacaaggcgttcttcctggcatggtctggcaggacagagatgtgtacctgcaggggcccatctgggcaaagattcctcacacggacggacactttcacccttctcccctcatgggcggatttggattgaagcaccctcccccacagattctcatcaagaataccccggtacctgcgaatccttcgaccaccttcagtgcggcaaagtttgcttccttcatcacacagtattccacgggacaggtcagcgtggagatagagtgggagctgcagaaggagaacagcaaacgctggaaccccgagatccagtatacttccaactacaacaaatctgttaatgtggactttactgtggacactaatggtgtgtattcagagcctcgccccattggcaccagatacctgactcgtaatctgtaa

SEQ ID NO: 3510 - DNA, 2208 bp, Artificial Sequence
  source: /note="Description of Artificial Sequence: Synthetic polynucleotide"
atggctgccgatggttatcttccagattggctcgaggacactctctctgaaggaataagacagtggtggaagctcaaacctggcccaccaccgccaaagcccgcagagcggcataaggrcgacagcaggggtcttgtgcttcctgggtacaagtacctcggacccttcaacggactcgacaagggggagccggtcaacgaggcagacgccgcggccctcgagcacgacaaggcctacgaccggcagctcgacagcggagacaacccgtacctcaagtacaaccacgccgacgcggagtttcaggagcgtcttaaagaagatacgtcttttgggggcaacctcggacgagcagtcttccaggcgaaaaagagggttcttgaacctctgggcctggttgaggaacctgttaagacggctccgggaaaaaagaggccggtagagcactctcctgtggagccagactcctcctcgggaaccggaaaggcgggccagcagcctgcaagaaaaagattgaatttcggtcagactggagacgcagactccgtacctgacccccagcctctcggacagccaccagcagccccctctggtctgggaactaatacgatggctacaggcagtggcgcaccaatggcagacaataacgagggcgccgacggagtgggtaattcctcgggaaattggcattgcgattccacatggatgggcgacagagtcatcaccaccagcacccgcacctgggctctgcccacctacaacaaccatctgtacaagcaaatttccagccaatcaggagcatcgaacgacaaccactactttggctacagcaccccctgggggtattttgacttcaacagattccactgccacttttcgccacgtgactggcaaagactcatcaacaacaactggggattccggcccaagagactcagcttcaagctctttaacattcaagtcaaggaggtcacgcagaatgacggtacgacgacgattgccaataaccttaccagcacggttcaggtctttactgactcggagtaccagctcccgtacgtcctcggctcggcgcatcaaggatgcctcccgccgttcccagcagacgtcttcatggtgccacagtatggatacctcaccctgaacaacgggagtcaggcggtaggacgctcttcattttactgcctggagtacttcccttctcagatgcttcgcacgggaaacaactttaccttcagctacacctttgaggacgtgccttttcacagcagctacgctcacagccaaagtctggaccgtctcatgaatcctctcatcgaccaatacctgtattacttgagcaaaacaaacgctccaagcggaaccaccacgatgtccaggcttcagttttctcaggccggagcgagtgacattcgggaccagtctagaaactggcttcctggaccctgttaccgccagcagcgagtatcaaagacagctgcggacaacaacaacagtgattactcgtggactggagctaccaagtaccacctcaatggaagagactctctggtgaacccgggcccagctatggccagccacaaggatgatgaagaaaaatattttcctcagagcggggttctcatcttcgggaaacaaggctcaaataaaactaatgtggacattgaaaaggttatgattacagacgaagaggaaatcaggaccaccaatcccgtggctacggagcagtatggttctgtatctaccaaccttcaaagcggcaacacacaagcagctacctcagatgtcaacacacaaggcgttcttcctggcatggtctggcaggacagagatgtgtacctgcaggggcccatctgggcaaagattcctcacacggacggacactttcacccttctcccctcatgggcggatttggattgaagcaccctcccccacagattctcatcaagaataccccggtacctgcgaatccttcgaccaccttcagtgcggcaaagtttgcttccttcatcacacagtattccacgggacaggtcagcgtggagatagagtgggagctgcagaaggagaacagcaaacgctggaaccccgagatccagtatacttccaactacaacaaatctgttaatgtggactttactgtggacactaatggtgtgtattcagagcctcaccccattggcaccagatacctgactcgtaatctgtaa

SEQ ID NO: 3511 - DNA, 2208 bp, Artificial Sequence
  source: /note="Description of Artificial Sequence: Synthetic polynucleotide"
atggctgccgatggttatcttccagattggctcgaggacactctctctgaaggaataagacagtggtggaagttcaaacctggcccaccaccgccaaagcccgcagagcggcataaggacgacagcaggggtcttgtgcttcctgggtacaagtacctcggacccttcaacggactcgacaagggggagccggtcaacgaggcagacgccgcggccctcgagcacgacaaggcctacgaccggcagctcgacagcggagacaacccgtacctcaagtacaaccacgccgacgcggagtttcaggagcgtcttaaagaagatacgtcttttgggggcaacctcggacgagcagtcttccaggcgaaaaagagggttcttgaacctctgggcctggttgaggaacctgttaagacggctccgggaaaaaagaggccggtagagcactctcctgtggagccagactcctcctcgggaaccggaaaggcgggccagcagcctgcaagaaaaagattgaatttcggtcagactggagacgcagactccgtacctgacccccagcctctcggacagccaccagcagccccctctggtctgggaactaatacgatggctacaggcagtggcgcaccaatggcagacaataacgagggcgccgacggagtgggtaattcctcgggaaattggcattgcgattccacatggatgggcgacagagtcatcaccaccagcacccgcacctgggctctgcccacctacaacaaccatctgtacaagcaaatttccagccaatcaggagcatcgaacgacaaccactactttggctacagcaccccctgggggtattttgacttcaacagattccactgccacttttcgccacgtgactggcaaagactcatcaacaacaactggggattccggcccaagagactcagcttcaagctctttaacattcaagtcaaggaggtcacgcagaatgacggtacgacgacgattgccaataaccttaccagcacggttcaggtctttactgactcggagtaccagctcccgtacgtcctcggctcggcgcatcaaggatgcctcccgccgttcccagcagacgtcttcatggtgccacagtatggatacctcaccctgaacaacgggagtcaggcggtaggacgctcttcattttactgcctggagtacttcccttctcagatgcttcgcacgggaaacaactttaccttcagctacacctttgaggacgtgccttttcacagcagctacgctcacagccaaagtctggaccgtctcatgaatcctctcatcgaccaatacctgtattacttgagcaaaacaaacgctccaagcggaaccaccacgatgtccaggcttcagttttctcaggccggagcgagtgacattcgggaccagtctagaaactggcttcctggaccctgttaccgccagcagcgagtatcaaagacagctgcggacaacaacaacagtgattactcgtggactggagctaccaagtaccacctcaatggaagagactctctggtgaacccgggcccagctatggccagccacaaggatgatgaagaaaaatattttcctcagagcggggttctcatcttcgggaaacaaggctcaaataaaactaatgtggacattgaaaaggttatgattacagacgaagaggaaatcaggaccaccaatcccgtggctacggagcagtatggttctgtatctaccaaccttcaaagcggcaacacacaagcagctacctcagatgtcaacacacaaggcgttcttcctggcatggtctggcaggacagagatgtgtacctgcaggggcccatctgggcaaagattcctcacacggacggacactttcacccttctcccctcatgggcggatttggattgaagcaccctcccccacagattctcatcaagaataccccggtacctgcgaatccttcgaccaccttcagtgcggcaaagtttgcttccttcatcacacagtattccacgggacaggtcagcgtggagatagagtgggagctgcagaaggagaacagcaaacgctggaaccccgagatccagtatacttccaactacaacaaatctgttaatgtggactttactgtggacactaatggtgtgtattcagagcctcgccccattggcaccagatacctgactcgtaatctgtaa

SEQ ID NO: 3512 - DNA, 2208 bp, Artificial Sequence
  source: /note="Description of Artificial Sequence: Synthetic polynucleotide"
atggctgccgatggttatcttccagattggctcgaggacactctctctgaaggaataagacagtggtggaagctcaaacctggcccaccaccgccaaagcccgcagagcggcataaggacgacagcaggggtcttgtgcttcctgggtacaagtacctcggacccttcaacggactcgacaagggggagccggtcaacgaggcagacgccgcggccctcgagcacgacaaggcctacgaccggcagctcgacagcggagacaacccgtacctcaagtacaaccacgccgacgcggagtttcaggagcgtcttaaagaagatacgtcttttgggggcaacctcggacgagcagtcttccaggcgaaaaagagggttcttgaacctctgggcctggttgaggaacctgttaagacggctccgggaaaaaagaggccggtagagcactctcctgtggagccagactcctcctcgggaaccggaaaggcgggccagcagcctgcaagaaaaagattgaatttcggtcagactggagacgcagactccgtacctgacccccagcctctcggacagccaccagcagccccctctggtctgggaactaatacgatggctacaggcagtggcgcaccaatggcagacaataacgagggcgccgacggagtgggtaattcctcgggaaattggcattgcgattccacatggatgggcgacagagtcatcaccaccagcacccgcacctgggctctgcccacctacaacaaccatctgtacaagcaaatttccagccaatcaggagcatcgaacgacaaccactactttggctacagcaccccctgggggtattttgacttcaacagattccactgccacttttcgtcacgtgactggcaaagactcatcaacaacaactggggattccggcccaagagactcagcttcaagctctttaacattcaagtcaaggaggtcacgcagaatgacggtacgacgacgattgccaataaccttaccagcacggttcaggtctttactgactcggagtaccagctcccgtacgtcctcggctcggcgcatcaaggatgcctcccgccgttcccagcagacgtcttcatggtgccacagtatggatacctcaccctgaacaacgggagtcaggcggtaggacgctcttcattttactgcctggagtacttcccttctcagatgcttcgcacgggaaacaactttaccttcagctacacctttgaggacgtgccttttcacagcagctacgctcacagccaaagtctggaccgtctcatgaatcctctcatcgaccaatacctgtattacttgagcaaaacaaacgctccaagcggaaccaccacgatgtccaggcttcagttttctcaggccggagcgagtgacattcgggaccagtctagaaactggcttcctggaccctgttaccgccagcagcgagtatcaaagacagctgcggacaacaacaacagtgattactcgtggactggagctaccaagtaccacctcaatggaagagactctctggtgaacccgggcccagctatggccagccacaaggatgatgaagaaaaatattttcctcagagcggggttctcatcttcgggaaacaaggctcaaataaaactaatgtggacattgaaaaggttatgattacagacgaagaggaaatcaggaccaccaatcccgtggctacggagcagtatggttctgtatctaccaaccttcaaagcggcaacacacaagcagctacctcagatgtcaacacacaaggcgttcttcctggcatggtctggcaggacagagatgtgtacctgcaggggcccatctgggcaaagattcctcacacggacggacactttcacccttctcccctcatgggcggatttggattgaagcaccctcccccacagattctcatcaagaataccccggtacctgcgaatccttcgaccaccttcagtgcggcaaagtttgcttccttcatcacacagtattccacgggacaggtcagcgtggagatagagtgggagctgcagaaggagaacagcaaacgctggaaccccgagatccagtatacttccaactacaacaaatctgttaatgtggactttactgtggacactaatggtgtgtattcagagcctcgccccattggcaccagatacctgactcgtaatctgtaa

SEQ ID NO: 3513 - DNA, 2208 bp, Artificial Sequence
  source: /note="Description of Artificial Sequence: Synthetic polynucleotide"
atggctgccgatggttatcttccagattggctcgaggacactctctctgaaggaataagacagtggtggaagctcaaacctggcccaccaccgccaaagcccgcagagcggcatgaggacgacagcaggggtcttgtgcttcctgggtacaagtacctcggacccttcaacggactcgacaagggggagccggtcaacgaggcagacgccgcggccctcgagcacgacaaggcctacgaccggcagctcgacagcggagacaacccgtacctcaagtacaaccacgccgacgcggagtttcaggagcgtcttaaagaagatacgtcttttgggggcaacctcggacgagcagtcttccaggcgaaaaagagggttcttgaacctctgggcctggttgaggaacctgttaagacggctccgggaaaaaagaggccggtagagcactctcctgtggagccagactcctcctcgggaaccggaaaggcgggccagcagcctgcaagaaaaagattgaatttcggtcagactggagacgcagactccgtacctgacccccagcctctcggacagccaccagcagccccctctggtctgggaactaatacgatggctacaggcagtggcgcaccaatggcagacaataacgagggcgccgacggagtgggtaattcctcgggaaattggcattgcgattccacatggatgggcgacagagtcatcaccaccagcacccgcacctgggctctgcccacctacaacaaccatctgtacaagcaaatttccagccaatcaggagcatcgaacgacaaccactactttggctacagcaccccctgggggtattttgacttcaacagattccactgccacttttcgccacgtgactggcaaagactcatcaacaacaactggggattccggcccaagagactcagcttcaagctctttaacattcaagtcaaggaggtcacgcagaatgacggtacgacgacgattgccaataaccttaccagcacggttcaggtctttactgactcggagtaccagctcccgtacgtcctcggctcggcgcatcaaggatgcctcccgccgttcccagcagacgtcttcatggtgccacagtatggatacctcaccctgaacaacgggagtcaggcggtaggacgctcttcattttactgcctggagtacttcccttctcagatgcttcgcacgggaaacaactttaccttcagctacacctttgaggacgtgccttttcacagcagctacgctcacagccaaagtctggaccgtctcatgaatcctctcatcgaccaatacctgtattacttgagcaaaacaaacgctccaagcggaaccaccacgatgtccaggcttcagttttctcaggccggagcgagtgacattcgggaccagtctagaaactggcttcctggaccctgttaccgccagcagcgagtatcaaagacagctgcggacaacaacaacagtgattactcgtggactggagctaccaagtaccacctcaatggaagagactctctggtgaacccgggcccagctatggccagccacaaggatgatgaagaaaaatattttcctcagagcggggttctcatcttcgggaaacaaggctcaaataaaactaatgtggacattgaaaaggttatgattacagacgaagaggaaatcaggaccaccaatcccgtggctacggagcagtatggttctgtatctaccaaccttcaaagcggcaacacacaagcagctacctcagatgtcaacacacaaggcgttcttcctggcatggtctggcaggacagagatgtgtacctgcaggggcccatctgggcaaagattcctcacacggacggacactttcacccttctcccctcatgggcggatttggattgaagcaccctcccccacagattctcatcaagaataccccggtacctgcgaatccttcgaccaccttcagtgcggcaaagtttgcttccttcatcacacagtattccacgggacaggtcagcgtggagatagagtgggagctgcagaaggagaacagcaaacgctggaaccccgagatccagtatacttccaactacaacaaatctgttaatgtggactttactgtggacactaatggtgtgtattcagagcctcgccccattggcaccagatacctgactcgtaatctgtaa

SEQ ID NO: 3514 - DNA, 2205 bp, Artificial Sequence
  source: /note="Description of Artificial Sequence: Synthetic polynucleotide"
atggctgccgatggttatcttccagattggctcgaggacactctctctgaaggaataagacagtggtggaagctcaaacctggcccaccaccgccaaagcccgcagagcggcataaggacgacagcaggggtcttgtgcttcctgggtacaagtacctcggacccttcaacggactcgacaagggggagccggtcaacgaggcagacgccgcggccctcgagcacgacaaggcctacgaccggcagctcgacagcggagacaacccgtacctcaagtacaaccacgccgacgcggagtttcaggagcgtcttaaagaagatacgtcttttgggggcaacctcggacgagcagtcttccaggcgaaaaagagggttcttgaacctctgggcctggttgaggaacctgttaagacggctccgggaaaaaagaggccggtagagcactctcctgtggagccagactcctcctcgggaaccggaaaggcgggccagcagcctgcaagaaaaagattgaatttcggtcagactggagacgcagactccgtacctgacccccagcctctcggacagccaccagcagccccctctggtctgggaactaatacgatggctacaggcagtggcgcaccaatggcagacaataacgagggcgccgacggagtgggtaattcctcgggaaattggcattgcgattccacatggatgggcgacagagtcatcaccaccagcacccgcacctgggctctgcccacctacaacaaccatctgtacaagcaaatttccagccaatcaggagcatcgaacgacaaccactactttggctacagcaccccctgggggtattttgacttcaacagattccactgccacttttcgccacgtgactggcaaagactcatcaacaacaactggggattccggcccaagagactcagcttcaagctctttaacattcaagtcaaggaggtcacgcagaatgacggtacgacgacgattgccaataaccttaccagcacggttcaggtctttactgactcggagtaccagctcccgtacgtcctcggctcggcgcatcaaggatgcctcccgccgttcccagcagacgtcttcatggtgccacagtatggatacctcaccctgaacaacgggagtcaggcggtaggacgctcttcattttactgcctggagtacttcccttctcagatgcttcgcacgggaaacaactttaccttcagctacacctttgaggacgtgccttttcacagcagctacgctcacagccaaagtctggaccgtctcatgaatcctctcatcgaccaatacctgtattacttgagcaaaacaaacgctccaagcggaaccaccacgatgtccaggcttcagttttctcaggccggagcgagtgacattcgggaccagtctagaaactggcttcctggaccctgttaccgccagcagcgagtatcaaagacagctgcggacaacaacagtgattactcgtggactggagctaccaagtaccacctcaatggaagagactctctggtgaacccgggcccagctatggccagccacaaggatgatgaagaaaaatattttcctcagagcggggttctcatcttcgggaaacaaggctcaaataaaactaatgtggacattgaaaaggttatgattacagacgaagaggaaatcaggaccaccaatcccgtggctacggagcagtatggttctgtatctaccaaccttcaaagcggcaacacacaagcagctacctcagatgtcaacacacaaggcgttcttcctggcatggtctggcaggacagagatgtgtacctgcaggggcccatctgggcaaagattcctcacacggacggacactttcacccttctcccctcatgggcggatttggattgaagcaccctcccccacagattctcatcaagaataccccggtacctgcgaatccttcgaccaccttcagtgcggcaaagtttgcttccttcatcacacagtattccacgggacaggtcagcgtggagatagagtgggagctgcagaaggagaacagcaaacgctggaaccccgagatccagtatacttccaactacaacaaatctgttaatgtggactttactgtggacactaatggtgtgtattcagagcctcgccccattggcaccagatacctgactcgtaatctgtaa

SEQ ID NO: 3515 - DNA, 2208 bp, Artificial Sequence
  source: /note="Description of Artificial Sequence: Synthetic polynucleotide"
atggctgccgatggttatcttccagattggctcgaggacactctctctgaaggaataagacagtggtggaagctcaaacctggcccaccaccgccaaagcccgcagagtggcataaggacgacagcaggggtcttgtgcttcctgggtacaagtacctcggacccttcaacggactcgacaagggggagccggtcaacgaggcagacgccgcggccctcgagcacgacaaggcctacgaccggcagctcgacagcggagacaacccgtacctcaagtacaaccacgccgacgcggagtttcaggagcgtcttaaagaagatacgtcttttgggggcaacctcggacgagcagtcttccaggcgaaaaagagggttcttgaacctctgggcctggttgaggaacctgttaagacggctccgggaaaaaagaggccggtagagcactctcctgtggagccagactcctcctcgggaaccggaaaggcgggccagcagcctgcaagaaaaagattgaatttcggtcagactggagacgcagactccgtacctgacccccagcctctcggacagccaccagcagccccctctggtctgggaactaatacgatggctacaggcagtggcgcaccaatggcagacaataacgagggcgccgacggagtgggtaattcctcgggaaattggcattgcgattccacatggatgggcgacagagtcatcaccaccagcacccgcacctgggctctgcccacctacaacaaccatctgtacaagcaaatttccagccaatcaggagcatcgaacgacaaccactactttggctacagcaccccctgggggtattttgacttcaacagattccactgccacttttcgccacgtgactggcaaagactcatcaacaacaactggggattccggcccaagagactcagcttcaagctctttaacattcaagtcaaggaggtcacgcagaatgacggtacgacgacgattgccaataaccttaccagcacggttcaggtctttactgactcggagtaccagctcccgtacgtcctcggctcggcgcatcaaggatgcctcccgccgttcccagcagacgtcttcatggtgccacagtatggatacctcaccctgaacaacgggagtcaggcggtaggacgctcttcattttactgcctggagtacttcccttctcagatgcttcgcacgggaaacaactttaccttcagctacacctttgaggacgtgccttttcacagcagctacgctcacagccaaagtctggaccgtctcatgaatcctctcatcgaccaatacctgtattacttgagcaaaacaaacgctccaagcggaaccaccacgatgtccaggcttcagttttctcaggccggagcgagtgacattcgggaccagtctagaaactggcttcctggaccctgttaccgccagcagcgagtatcaaagacagctgcggacaacaacaacagtgattactcgtggactggagctaccaagtaccacctcaatggaagagactctctggtgaacccgggcccagctatggccagccacaaggatgatgaagaaaaatattttcctcagagcggggttctcatcttcgggaaacaaggctcaaataaaactaatgtggacattgaaaaggttatgattacagacgaagaggaaatcaggaccaccaatcccgtggctacggagcagtatggttctgtatctaccaaccttcaaagcggcaacacacaagcagctacctcagatgtcaacacacaaggcgttcttcctggcatggtctggcaggacagagatgtgtacctgcaggggcccatctgggcaaagattcctcacacggacggacactttcacccttctcccctcatgggcggatttggattgaagcaccctcccccacagattctcatcaagaataccccggtacctgcgaatccttcgaccaccttcagtgcggcaaagtttgcttccttcatcacacagtattccacgggacaggtcagcgtggagatagagtgggagctgcagaaggagaacagcaaacgctggaaccccgagatccagtatacttccaactacaacaaatctgttaatgtggactttactgtggacactaatggtgtgtattcagagcctcgccccattggcaccagatacctgactcgtaatctgtaa

SEQ ID NO: 3516 - DNA, 2208 bp, Artificial Sequence
  source: /note="Description of Artificial Sequence: Synthetic polynucleotide"
atggctgccgatggttatcttccagattggctcgaggacactctctctgaaggaataagacagtggtggaagctcaaacctggcccaccaccgccaaagcccgcagagcggcataaggacgacagcaggggtcttgtgcttcctgggtacaagtacctcggacccttcaacggactcgacaagggggagccggtcaacgaggcagacgccgcggccctcgagcacgacaaggcctacgaccggcagctcgacagcggagacaacccgtacctcaagtacaaccacgccgacgcggagtttcaggagcgtcttaaagaagatacgtcttttgggggcaacctcggacgagcagtcttccaggcgaaaaagagggttcttgaacctctgggcctggttgaggaacctgttaagacggctccgggaaaaaagaggccggtagagcactctcctgtggagccagactcctcctcgggaaccggaaaggcgggccagcagcctgcaagaaaaagattgaatttcggtcagactggagacgcagactccgtacctgacccccagcctctcggacagccaccagcagccccctctggtctgggaactaatacgatggctacaggcagtggcgcaccaatggcagacaataacgagggcgccgacggagtgggtaattcctcgggaaattggcattgcgattccacatggatgggcgacagagtcatcaccaccagcacccgcacctgggctctgcccacctacaacaaccatctgtacaagcaaatttccagccaatcaggagcatcgaacgacaaccactactttggctacagcaccccctgggggtattttgacttcaacagattccactgccacttttcgccacgtgactggcaaagactcatcaacaacaactggggattccggcccaagagactcagcttcaagctctttaacattcaagtcaaggaggtcacgcagaatgacggtacgacgacgattgccaataaccttaccagcacggttcaggtctttactgactcggagtaccagctcccgtacgtcctcggctcggcgcatcaaggatgcctcccgccgttcccagcagacgtcttcatggtgccacagtatggatacctcaccctgaacaacgggagtcaggcggtaggacgctcttcattttactgcctggagtacttcccttctcagatgcttcgcacgggaaacaactttaccttcagctacacctttgaggacgtgccttttcacagcagctacgctcacagccaaagtctggaccgtctcatgaatcctctcatcgaccaatacctgtattacttgagcaaaacaaacgctccaagcggaaccaccacgatgtccaggcttcagttttctcaggccggagcgagtgacattcgggaccagtctagaaactggcttcctggaccctgttaccgccagcagcgagtatcaaagacagctgcggacaacaacaacagtgattactcgtggactggagctaccaagtaccacctcaatggaagagactctctggtgaacccgggcccagctatggccagccacaaggatgatgaagaaaaatattttcctcagagcggggttctcatcttcgggaaacaaggctcaaataaaactaatgtggacattgaaaaggttatgattacagacgaagaggaaatcaggaccaccaatcccgtggctacggagcagtatggttctgtatctaccaaccttcaaagcggcaacacacaagcagctacctcagatgtcaacacacaaggcgttcttcctgacatggtctggcaggacagagatgtgtacctgcaggggcccatctgggcaaagattcctcacacggacggacactttcacccttctcccctcatgggcggatttggattgaagcaccctcccccacagattctcatcaagaataccccggtacctgcgaatccttcgaccaccttcagtgcggcaaagtttgcttccttcatcacacagtattccacgggacaggtcagcgtggagatagagtgggagctgcagaaggagaacagcaaacgctggaaccccgagatccagtatacttccaactacaacaaatctgttaatgtggactttactgtggacactaatggtgtgtattcagagcctcgccccattggcaccagatacctgactcgtaatctgtaa

SEQ ID NO: 3517 - DNA, 2208 bp, Artificial Sequence
  source: /note="Description of Artificial Sequence: Synthetic polynucleotide"
atggctgccgatggttatcttccagattggctcgaggacactctctctgaaggaataagacagtggtggaagctcaaacctggcccaccaccgccaaagcccgcagagcggcataaggacgacagcaggggtcttgtgcttcctgggtacaagtacctcggacccttcaacggactcgacaagggggagccggtcaacgaggcagacgccgcggccctcgagcacgacaaggcctacgaccggcagctcgacagcggagacaacccgtacctcaagtacaaccacgccgacgcggagtttcaggagcgtcttaaagaagatacgtcttttggggacaacctcggacgagcagtcttccaggcgaaaaagagggttcttgaacctctgggcctggttgaggaacctgttaagacggctccgggaaaaaagaggccggtagagcactctcctgtggagccagactcctcctcgggaaccggaaaggcgggccagcagcctgcaagaaaaagattgaatttcggtcagactggagacgcagactccgtacctgacccccagcctctcggacagccaccagcagccccctctggtctgggaactaatacgatggctacaggcagtggcgcaccaatggcagacaataacgagggcgccgacggagtgggtaattcctcgggaaattggcattgcgattccacatggatgggcgacagagtcatcaccaccagcacccgcacctgggctctgcccacctacaacaaccatctgtacaagcaaatttccagccaatcaggagcatcgaacgacaaccactactttggctacagcaccccctgggggtattttgacttcaacagattccactgccacttttcgccacgtgactggcaaagactcatcaacaacaactggggattccggcccaagagactcagcttcaagctctttaacattcaagtcaaggaggtcacgcagaatgacggtacgacgacgattgccaataaccttaccagcacggttcaggtctttactgactcggagtaccagctcccgtacgtcctcggctcggcgcatcaaggatgcctcccgccgttcccagcagacgtcttcatggtgccacagtatggatacctcaccctgaacaacgggagtcaggcggtaggacgctcttcattttactgcctggagtacttcccttctcagatgcttcgcacgggaaacaactttaccttcagctacacctttgaggacgtgccttttcacagcagctacgctcacagccaaagtctggaccgtctcatgaatcctctcatcgaccaatacctgtattacttgagcaaaacaaacgctccaagcggaaccaccacgatgtccaggcttcagttttctcaggccggagcgagtgacattcgggaccagtctagaaactggcttcctggaccctgttaccgccagcagcgagtatcaaagacagctgcggacaacaacaacagtgattactcgtggactggagctaccaagtaccacctcaatggaagagactctctggtgaacccgggcccagctatggccagccacaaggatgatgaagaaaaatattttcctcagagcggggttctcatcttcgggaaacaaggctcaaataaaactaatgtggacattgaaaaggttatgattacagacgaagaggaaatcaggaccaccaatcccgtggctacggagcagtatggttctgtatctaccaaccttcaaagcggcaacacacaagcagctacctcagatgtcaacacacaaggcgttcttcctggcatggtctggcaggacagagatgtgtacctgcaggggcccatctgggcaaagattcctcacacggacggacactttcacccttctcccctcatgggcggatttggattgaagcaccctcccccacagattctcatcaagaataccccggtacctgcgaatccttcgaccaccttcagtgcggcaaagtttgcttccttcatcacacagtattccacgggacaggtcagcgtggagatagagtgggagctgcagaaggagaacagcaaacgctggaaccccgagatccagtatacttccaactacaacaaatctgttaatgtggactttactgtggacactaatggtgtgtattcagagcctcgccccattggcaccagatacctgactcgtaatctgtaa

SEQ ID NO: 3518 - DNA, 2208 bp, Artificial Sequence
  source: /note="Description of Artificial Sequence: Synthetic polynucleotide"
atggctgccgatggttatcttccagattggctcgaggacactctctctgaaggaataagacagtggtggaagctcaaacctggcccaccaccgccaaagcccgcagagcggcataaggacgacagcaggggtcttgtgcttcctgggtacaagtacctcggacccttcaacggactcgacaagggggagccggtcaacgaggcagacgccgcggccctcgagcacgacaaggcctacgaccggcagctcgacagcggagacaacccgtacctcaagtacaaccacgccgacgcggagtttcaggagcgtcttaaagaagatacgtcttttgggggcaacctcggacgagcagtcttccaggcgaaaaagagggttcttgaacctctgggcctggttgaggaacctgttaagacggctccgggaaaaaagaggccggtagagcactctcctgtggagccagactcctcctcgggaaccggaaaggcgggccagcagcctgcaagaaaaagattgaatttcggtcagactggagacgcagactccgtacctgacccccagcctctcggacagccaccagcagccccctctggtctgggaactaatacgatggctacaggcagtggcgcaccaatggcagacaataacgagggcgccgacggagtgggtaattcctcgggaaattggcattgcgattccacatggatgggcgacagagtcatcaccaccagcacccgcacctgggctctgcccacctacaacaaccatctgtacaagcaaatttccagccaatcaggagcatcgaacgacaaccactactttggctacagcaccccctgggggtattttgacttcaacagattccactgccacttttcgccacgtgactggcaaagactcatcaacaacaactggggattccggcccaagagactcagcttcaagctctttaacattcaagtcaaggaggtcacgcagaatgacggtacgacgacgattgccaataaccttaccagcacggttcaggtctttactgactcggagtaccagctcccgtacgtcctcgactcggcgcatcaaggatgcctcccgccgttcccagcagacgtcttcatggtgccacagtatggatacctcaccctgaacaacgggagtcaggcggtaggacgctcttcattttactgcctggagtacttcccttctcagatgcttcgcacgggaaacaactttaccttcagctacacctttgaggacgtgccttttcacagcagctacgctcacagccaaagtctggaccgtctcatgaatcctctcatcgaccaatacctgtattacttgagcaaaacaaacgctccaagcggaaccaccacgatgtccaggcttcagttttctcaggccggagcgagtgacattcgggaccagtctagaaactggcttcctggaccctgttaccgccagcagcgagtatcaaagacagctgcggacaacaacaacagtgattactcgtggactggagctaccaagtaccacctcaatggaagagactctctggtgaacccgggcccagctatggccagccacaaggatgatgaagaaaaatattttcctcagagcggggttctcatcttcgggaaacaaggctcaaataaaactaatgtggacattgaaaaggttatgattacagacgaagaggaaatcaggaccaccaatcccgtggctacggagcagtatggttctgtatctaccaaccttcaaagcggcaacacacaagcagctacctcagatgtcaacacacaaggcgttcttcctggcatggtctggcaggacagagatgtgtacctgcaggggcccatctgggcaaagattcctcacacggacggacactttcacccttctcccctcatgggcggatttggattgaagcaccctcccccacagattctcatcaagaataccccggtacctgcgaatccttcgaccaccttcagtgcggcaaagtttgcttccttcatcacacagtattccacgggacaggtcagcgtggagatagagtgggagctgcagaaggagaacagcaaacgctggaaccccgagatccagtatacttccaactacaacaaatctgttaatgtggactttactgtggacactaatggtgtgtattcagagcctcgccccattggcaccagatacctgactcgtaatctgtaa

SEQ ID NO: 3519 - DNA, 2208 bp, Artificial Sequence
  source: /note="Description of Artificial Sequence: Synthetic polynucleotide"
atggctgccgatggttatcttccagattggctcgaggacactctctctgaaggaataagacagtggtggaagctcaaacctggcccaccaccgccaaagcccgcagagcggcataaggacgacagcaggggtcttgtgcttcctgggtacaagtacctcggacccttcaacggactcgacaagggggagccggtcaacgaggcagacgccgcggccctcgagcacgacaaggcctacgaccggcagctcgacagcggagacaacccgtacctcaagtacaaccacgccgacgcggagtttcaggagcgtcttaaagaagatacgtcttttgggggcaacctcggacgagcagtcttccaggcgaaaaagagggttcttgaacctctgggcctggttgaggaacctgttaagacggctccgggaaaaaagaggccggtagagcactctcctgtggagccagactcctcctcgggaaccggaaaggcgggccagcagcctgcaagaaaaagattgaatttcggtcagactggagacgcagactccgtacctgacccccagcctctcggacagccaccagcagccccctctggtctgggaactaatacgatggctacaggcagtggcgcaccaatggcagacaataacgagggcgccgacggagtgggtaattcctcgggaaattggcattgcgattccacatggatgggcgacagagtcatcaccaccagcacccgcacctgggctctgcccacctacaacaaccatctgtacaagcaaatttccagccaatcaggagcatcgaacgacaaccactactttggctacagcaccccctgggggtattttgacttcaacagattccactgccacttttcgccacgtgactggcaaagactcatcaacaacaactggggattccggcccaagagactcagcttcaagctctttaacattcaagtcaaggaggtcacgcagaatgacggtacgacgacgattgccaataaccttaccagcacggttcaggtctttactgactcggagtaccagctcccgtacgtcctcggctcggcgcatcaaggatgcctcccgccgttcccagcagacgtcttcatggtgccacagtatggatacctcaccctgaacaacgggagtcaggcggtaggacgctcttcattttactgcctggagtacttcccttctcagatgcttcgcacgggaaacaactttaccttcagctacacctttgaggacgtgccttttcacagcagctacgctcacagccaaagtctggaccgtctcatgaatcctctcatcgaccaatacctgtattacttgagcaaaacaaacgctccaagcggaaccaccacgatgtccaggcttcagttttctcaggccggagcgagtgacattcgggaccagtctagaaactggcttcctggaccctgttaccgccagcagcgagtatcaaagacagctgcggacaacaacaacagtgattactcgtggactggagctaccaagtaccacctcaatggaagagactctctggtgaacccgggcccagctatggccagccacaaggatgatgaagaaaaatattttcctcagagcggggttctcatcttcgggaaacaaggctcaaataaaactaatgtggacattgaaaaggttatgattacagacgaagaggaaatcaggaccaccaatcccgtggctacggagcagtatggttctgtatctaccaaccttcaaagcggcaacacacaagcagctacctcagatgtcaacacacaaggcgttcttcctggcatggtctggcaggacagagatgtgtacctgcaggggcccatctgggcaaagattcctcacacggacggacactttcacccttctcccctcatgggcggatttggattgaagcaccctcccccacagattctcatcaagaataccccggtacctgcgaatccttcgaccaccttcagtgcgacaaagtttgcttccttcatcacacagtattccacgggacaggtcagcgtggagatagagtgggagctgcagaaggagaacagcaaacgctggaaccccgagatccagtatacttccaactacaacaaatctgttaatgtggactttactgtggacactaatggtgtgtattcagagcctcgccccattggcaccagatacctgactcgtaatctgtaa

SEQ ID NO: 3520 - DNA, 2208 bp, Artificial Sequence
  source: /note="Description of Artificial Sequence: Synthetic polynucleotide"
atggctgccgatggttatcttccagattggctcgaggacactctctctgaaggaataagacagtggtggaagctcaaacctggcccaccaccgccaaagcccgcagagcggcataaggacgacagcaggggtcttgtgcttcctgggtacaagtacctcggacccttcaacggactcgacaagggggagtcggtcaacgaggcagacgccgcggccctcgagcacgacaaggcctacgaccggcagctcgacagcggagacaacccgtacctcaagtacaaccacgccgacgcggagtttcaggagcgtcttaaagaagatacgtcttttgggggcaacctcggacgagcagtcttccaggcgaaaaagagggttcttgaacctctgggcctggttgaggaacctgttaagacggctccgggaaaaaagaggccggtagagcactctcctgtggagccagactcctcctcgggaaccggaaaggcgggccagcagcctgcaagaaaaagattgaatttcggtcagactggagacgcagactccgtacctgacccccagcctctcggacagccaccagcagccccctctggtctgggaactaatacgatggctacaggcagtggcgcaccaatggcagacaataacgagggcgccgacggagtgggtaattcctcgggaaattggcattgcgattccacatggatgggcgacagagtcatcaccaccagcacccgcacctgggctctgcccacctacaacaaccatctgtacaagcaaatttccagccaatcaggagcatcgaacgacaaccactactttggctacagcaccccctgggggtattttgacttcaacagattccactgccacttttcgccacgtgactggcaaagactcatcaacaacaactggggattccggcccaagagactcagcttcaagctctttaacattcaagtcaaggaggtcacgcagaatgacggtacgacgacgattgccaataaccttaccagcacggttcaggtctttactgactcggagtaccagctcccgtacgtcctcggctcggcgcatcaaggatgcctcccgccgttcccagcagacgtcttcatggtgccacagtatggatacctcaccctgaacaacgggagtcaggcggtaggacgctcttcattttactgcctggagtacttcccttctcagatgcttcgcacgggaaacaactttaccttcagctacacctttgaggacgtgccttttcacagcagctacgctcacagccaaagtctggaccgtctcatgaatcctctcatcgaccaatacctgtattacttgagcaaaacaaacgctccaagcggaaccaccacgatgtccaggcttcagttttctcaggccggagcgagtgacattcgggaccagtctagaaactggcttcctggaccctgttaccgccagcagcgagtatcaaagacagctgcggacaacaacaacagtgattactcgtggactggagctaccaagtaccacctcaatggaagagactctctggtgaacccgggcccagctatggccagccacaaggatgatgaagaaaaatattttcctcagagcggggttctcatcttcgggaaacaaggctcaaataaaactaatgtggacattgaaaaggttatgattacagacgaagaggaaatcaggaccaccaatcccgtggctacggagcagtatggttctgtatctaccaaccttcaaagcggcaacacacaagcagctacctcagatgtcaacacacaaggcgttcttcctggcatggtctggcaggacagagatgtgtacctgcaggggcccatctgggcaaagattcctcacacggacggacactttcacccttctcccctcatgggcggatttggattgaagcaccctcccccacagattctcatcaagaataccccggtacctgcgaatccttcgaccaccttcagtgcggcaaagtttgcttccttcatcacacagtattccacgggacaggtcagcgtggagatagagtgggagctgcagaaggagaacagcaaacgctggaaccccgagatccagtatacttccaactacaacaaatctgttaatgtggactttactgtggacactaatggtgtgtattcagagcctcgccccattggcaccagatacctgactcgtaatctgtaa

SEQ ID NO: 3521 - DNA, 2208 bp, Artificial Sequence
  source: /note="Description of Artificial Sequence: Synthetic polynucleotide"
atggctgccgatggttatcttccagattggctcgaggacactctctctgaaggaataagacagtggtggaagctcaaacctggcccaccaccgccaaagcccgcagagcggcataaggacgacagcaggggtcttgtgcttcctgggtacaagtacctcggacccttcaacggactcgacaagggggagccggtcaacgaggcagacgccgcggccctcgagcacgacaaggcctacgaccggcagctcgacagcggagacaacccgtacctcaagtacaaccacgccgacgcggagtttcaggagcgtcttaaagaagatacgtcttttgggggcaacctcggacgagcagtcttccaggcgaaaaagagggttcttgaacctctgggcctggttgaggaacctgttaagacggctccgggaaaaaagaggccggtagagcactctcctgtggagccagactcctcctcgggaaccggaaaggcgggccagcagcctgcaagaaaaagattgaatttcggtcagactggagacgcagactccgtacctgacccccagcctctcggacagccaccagcagccccctctggtctgggaactaatacgatggctacaggcagtggcgcaccaatggcagacaataacgagggcgccgacggagtgggtaattcctcgggaaattggcattgcgattccacatggatgggcgacagagtcatcaccaccagcacccgcacctgggctctgcccacctacaacaaccatctgtacaagcaaatttccagccaatcaggagcatcgaacgacaaccactactttggctacagcaccccctgggggtattttgacttcaacagattccactgccacttttcgccacgtgactggcaaagactcatcaacaacaactggggattccggcccaagagactcagcttcaagctctttaacattcaagtcaaggaggtcacgcagaatgacggtacgacgacgattgccaataaccttaccagcacggttcaggtctttactgactcggagtaccagctcccgtacgtcctcggctcggtgcatcaaggatgcctcccgccgttcccagcagacgtcttcatggtgccacagtatggatacctcaccctgaacaacgggagtcaggcggtaggacgctcttcattttactgcctggagtacttcccttctcagatgcttcgcacgggaaacaactttaccttcagctacacctttgaggacgtgccttttcacagcagctacgctcacagccaaagtctggaccgtctcatgaatcctctcatcgaccaatacctgtattacttgagcaaaacaaacgctccaagcggaaccaccacgatgtccaggcttcagttttctcaggccggagcgagtgacattcgggaccagtctagaaactggcttcctggaccctgttaccgccagcagcgagtatcaaagacagctgcggacaacaacaacagtgattactcgtggactggagctaccaagtaccacctcaatggaagagactctctggtgaacccgggcccagctatggccagccacaaggatgatgaagaaaaatattttcctcagagcggggttctcatcttcgggaaacaaggctcaaataaaactaatgtggacattgaaaaggttatgattacagacgaagaggaaatcaggaccaccaatcccgtggctacggagcagtatggttctgtatctaccaaccttcaaagcggcaacacacaagcagctacctcagatgtcaacacacaaggcgttcttcctggcatggtctggcaggacagagatgtgtacctgcaggggcccatctgggcaaagattcctcacacggacggacactttcacccttctcccctcatgggcggatttggattgaagcaccctcccccacagattctcatcaagaataccccggtacctgcgaatccttcgaccaccttcagtgcggcaaagtttgcttccttcatcacacagtattccacgggacaggtcagcgtggagatagagtgggagctgcagaaggagaacagcaaacgctggaaccccgagatccagtatacttccaactacaacaaatctgttaatgtggactttactgtggacactaatggtgtgtattcagagcctcgccccattggcaccagatacctgactcgtaatctgtaa

SEQ ID NO: 3522 - DNA, 2208 bp, Artificial Sequence
  source: /note="Description of Artificial Sequence: Synthetic polynucleotide"
atggctgccgatggttatcttccagattggctcgaggacactctctctgaaggaataagacagtggtggaagctcaaacctggcccaccaccgccaaagcccgcagagcggcataaggacgacagcaggggtcttgtgcttcctgggtacaagtacctcggacccttcaacggactcgacaagggggagccggtcaacgaggcagacgccgcggccctcgagcacgacaaggcctacgaccggcagctcgacagcggagacaacccgtacctcaagtacaaccacgccgacgcggagtttcaggagcgtcttaaagaagatacgtcttttgggggcaacctcggacgagcagtcttccaggcgaaaaagagggttcttgaacctctgggcctggttgaggaacctgttaagacggctccgggaaaaaagaggccggtagagcactctcctgtggagtcagactcctcctcgggaaccggaaaggcgggccagcagcctgcaagaaaaagattgaatttcggtcagactggagacgcagactccgtacctgacccccagcctctcggacagccaccagcagccccctctggtctgggaactaatacgatggctacaggcagtggcgcaccaatggcagacaataacgagggcgccgacggagtgggtaattcctcgggaaattggcattgcgattccacatggatgggcgacagagtcatcaccaccagcacccgcacctgggctctgcccacctacaacaaccatctgtacaagcaaatttccagccaatcaggagcatcgaacgacaaccactactttggctacagcaccccctgggggtattttgacttcaacagattccactgccacttttcgccacgtgactggcaaagactcatcaacaacaactggggattccggcccaagagactcagcttcaagctctttaacattcaagtcaaggaggtcacgcagaatgacggtacgacgacgattgccaataaccttaccagcacggttcaggtctttactgactcggagtaccagctcccgtacgtcctcggctcggcgcatcaaggatgcctcccgccgttcccagcagacgtcttcatggtgccacagtatggatacctcaccctgaacaacgggagtcaggcggtaggacgctcttcattttactgcctggagtacttcccttctcagatgcttcgcacgggaaacaactttaccttcagctacacctttgaggacgtgccttttcacagcagctacgctcacagccaaagtctggaccgtctcatgaatcctctcatcgaccaatacctgtattacttgagcaaaacaaacgctccaagcggaaccaccacgatgtccaggcttcagttttctcaggccggagcgagtgacattcgggaccagtctagaaactggcttcctggaccctgttaccgccagcagcgagtatcaaagacagctgcggacaacaacaacagtgattactcgtggactggagctaccaagtaccacctcaatggaagagactctctggtgaacccgggcccagctatggccagccacaaggatgatgaagaaaaatattttcctcagagcggggttctcatcttcgggaaacaaggctcaaataaaactaatgtggacattgaaaaggttatgattacagacgaagaggaaatcaggaccaccaatcccgtggctacggagcagtatggttctgtatctaccaaccttcaaagcggcaacacacaagcagctacctcagatgtcaacacacaaggcgttcttcctggcatggtctggcaggacagagatgtgtacctgcaggggcccatctgggcaaagattcctcacacggacggacactttcacccttctcccctcatgggcggatttggattgaagcaccctcccccacagattctcatcaagaataccccggtacctgcgaatccttcgaccaccttcagtgcggcaaagtttgcttccttcatcacacagtattccacgggacaggtcagcgtggagatagagtgggagctgcagaaggagaacagcaaacgctggaaccccgagatccagtatacttccaactacaacaaatctgttaatgtggactttactgtggacactaatggtgtgtattcagagcctcgccccattggcaccagatacctgactcgtaatctgtaa

SEQ ID NO: 3523 - DNA, 2208 bp, Artificial Sequence
  source: /note="Description of Artificial Sequence: Synthetic polynucleotide"
atggctgccgatggttatcttccagattggctcgaggacactctctctgaaggaataagacagtggtggaagctcaaacctggcccaccaccgccaaagcccgcagagcggcataaggacgacagcaggggtcttgtgcttcctgggtacaagtacctcggacccttcaacggactcgacaagggggagccggtcaacgaggcagacgccgcggccctcgagcacgacaaggcctacgaccggcagctcgacagcggagacaacccgtacctcaagtacaaccacgccgacgcggagtttcaggagcgtcttaaagaagatacgtcttttgggggcaacctcggacgagcagtcttccaggcgaaaaagagggttcttgaacctctgggcctggttgaggaacctgttaagacggctccgggaaaaaagaggccggtagagcactctcctgtggagccagactcctcctcgggaaccggaaaggcgggccagcagcctgcaagaaaaagattgaatttcggtcagactggagacgcagactccgtacctgacccccagcctctcggacagccaccagcagccccctctggtctgggaactaatacgatggctacaggcagtggcgcaccaatggcagacaataacgagggcgccgacggagtgggtaattcctcgggaaattggcattgcgattccacatggatgggcgacagagtcatcaccaccagcacccgcacctgggctctgcccacctacaacaaccatctgtacaagcaaatttccagccaatcaggagcatcgaacgacaaccactactttggctacagcaccccctgggggtattttgacttcaacagattccactgccacttttcgccacgtgactggcaaagactcatcaacaacaactggggattccggcccaagagactcagcttcaagctctttaacattcaagtcaaggaggtcacgcagaatgacggtacgacgacgattgccaataaccttaccagcacggttcaggtctttactgactcggagtaccagctcccgtacgtcctcggctcggcgcatcaaggatgcctcccgccgttcccagcagacgtcttcatggtgccacagtatggatacctcaccctgaacaacgggagtcaggcggtaggacgctcttcattttactgcctggagtacttcccttctcagatgcttcgcacgggaaacaactttaccttcagctacacctttgaggacgtgccttttcacagcagctacgctcacagccaaagtatggaccgtctcatgaatcctctcatcgaccaatacctgtattacttgagcaaaacaaacgctccaagcggaaccaccacgatgtccaggcttcagttttctcaggccggagcgagtgacattcgggaccagtctagaaactggcttcctggaccctgttaccgccagcagcgagtatcaaagacagctgcggacaacaacaacagtgattactcgtggactggagctaccaagtaccacctcaatggaagagactctctggtgaacccgggcccagctatggccagccacaaggatgatgaagaaaaatattttcctcagagcggggttctcatcttcgggaaacaaggctcaaataaaactaatgtggacattgaaaaggttatgattacagacgaagaggaaatcaggaccaccaatcccgtggctacggagcagtatggttctgtatctaccaaccttcaaagcggcaacacacaagcagctacctcagatgtcaacacacaaggcgttcttcctggcatggtctggcaggacagagatgtgtacctgcaggggcccatctgggcaaagattcctcacacggacggacactttcacccttctcccctcatgggcggatttggattgaagcaccctcccccacagattctcatcaagaataccccggtacctgcgaatccttcgaccaccttcagtgcggcaaagtttgcttccttcatcacacagtattccacgggacaggtcagcgtggagatagagtgggagctgcagaaggagaacagcaaacgctggaaccccgagatccagtatacttccaactacaacaaatctgttaatgtggactttactgtggacactaatggtgtgtattcagagcctcgccccattggcaccagatacctgactcgtaatctgtaa

SEQ ID NO: 3524 - DNA, 2208 bp, Artificial Sequence
  source: /note="Description of Artificial Sequence: Synthetic polynucleotide"
atggctgccgatggttatcttccagattggctcgaggacactctctctgaaggaataagacagtggtggaagctcaaacctggcccaccaccgccaaagcccgcagagcggcataaggacgacagcaggggtcttgtgcttcctgggtacaagtacctcggacccttcaacggactcgacaagggggagccggtcaacgaggcagacgccgcggccctcgagcacgacaaggcctacgaccggcagctcgacagcggagacaacccgtacctcaagtacaaccacgccgacgcggagtttcaggagcgtcttaaagaagatacgtcttttgggggcaacctcggacgagcagtcttccaggcgaaaaagagggttcttgaacctctgggcctggttgaggaacctgttaagacggctccgggaaaaaagaggccggtagagcactctcctgtggagccagactcctcctcgggaaccggaaaggcgggccagcagcctgcaagaaaaagattgaatttcggtcagactggagacgcagactccgtacctgacccccagcctctcggacagccaccagcagccccctctggtctgggaactaatacgatggctacaggcagtggcgcaccaatggcagacaataacgagggcgccgacggagtgggtaattcctcgggaaattggcattgcgattccacatggatgggcgacagagtcatcaccaccagcacccgcacctgggctctgcccacctacaacaaccatctgtacaagcaaatttccagccaatcaggagcatcgaacgacaaccactactttggctacagcaccccctgggggtattttgacttcaacagattccactgccacttttcgccacgtgactggcaaagactcatcaacaacaactggggattccggcccaagagactcagcttcaagctctttaacattcaagtcaaggaggtcacgcagaatgacggtacgacgacgattgccaataaccttaccagcacggttcaggtctttactgactcggagtaccagctcccgtacgtcctcggctcggcgcatcaaggatgcctcccgccgttcccagcagacgtcttcatggtgccacagtatggatacctcaccctgaacaacgggagtcaggcggtaggacgctcttcattttactgcctggagtacttcccttctcagatgcttcgcacgggaaacaactttaccttcagctacacctttgaggacgtgccttttcacagcagctacgctcacagccaaagtctggaccgtctcatgaatcctctcatcgaccaatacctgtattacttgagcaaaacaaacgctccaagcggaaccaccacgatgtccaggcttcagttttctcaggccggagcgagtgacattcgggaccagtctagaaactggcttcctggaccctgttaccgccagcagcgagtatcaaagacagctgcggacaacaacaacagtgattactcgtggactggagctaccaagtaccacctcaatggaagagactctctggtgaacccgggcccagctatggccagccacaaggatgatgaagaaaaatattttcctcagagcggggttctcatctttcggaaacaaggctcaaataaaactaatgtggacattgaaaaggttatgattacagacgaagaggaaatcaggaccaccaatcccgtggctacggagcagtatggttctgtatctaccaaccttcaaagcggcaacacacaagcagctacctcagatgtcaacacacaaggcgttcttcctggcatggtctggcaggacagagatgtgtacctgcaggggcccatctgggcaaagattcctcacacggacggacactttcacccttctcccctcatgggcggatttggattgaagcaccctcccccacagattctcatcaagaataccccggtacctgcgaatccttcgaccaccttcagtgcggcaaagtttgcttccttcatcacacagtattccacgggacaggtcagcgtggagatagagtgggagctgcagaaggagaacagcaaacgctggaaccccgagatccagtatacttccaactacaacaaatctgttaatgtggactttactgtggacactaatggtgtgtattcagagcctcgccccattggcaccagatacctgactcgtaatctgtaa

SEQ ID NO: 3525 - DNA, 2208 bp, Artificial Sequence
  source: /note="Description of Artificial Sequence: Synthetic polynucleotide"
atggctgccgatggttatcttccagattggctcgaggacactctctctgaaggaataagacagtggtggaagctcaaacctggcccaccaccgccaaagcccgcagagcggcataaggacgacagcaggggtcttgtgcttcctgggtacaagtacctcggacccttcaacggactcgacaagggggagccggtcaacgaggcagacaccgcggccctcgagcacgacaaggcctacgaccggcagctcgacagcggagacaacccgtacctcaagtacaaccacgccgacgcggagtttcaggagcgtcttaaagaagatacgtcttttgggggcaacctcggacgagcagtcttccaggcgaaaaagagggttcttgaacctctgggcctggttgaggaacctgttaagacggctccgggaaaaaagaggccggtagagcactctcctgtggagccagactcctcctcgggaaccggaaaggcgggccagcagcctgcaagaaaaagattgaatttcggtcagactggagacgcagactccgtacctgacccccagcctctcggacagccaccagcagccccctctggtctgggaactaatacgatggctacaggcagtggcgcaccaatggcagacaataacgagggcgccgacggagtgggtaattcctcgggaaattggcattgcgattccacatggatgggcgacagagtcatcaccaccagcacccgcacctgggctctgcccacctacaacaaccatctgtacaagcaaatttccagccaatcaggagcatcgaacgacaaccactactttggctacagcaccccctgggggtattttgacttcaacagattccactgccacttttcgccacgtgactggcaaagactcatcaacaacaactggggattccggcccaagagactcagcttcaagctctttaacattcaagtcaaggaggtcacgcagaatgacggtacgacgacgattgccaataaccttaccagcacggttcaggtctttactgactcggagtaccagctcccgtacgtcctcggctcggcgcatcaaggatgcctcccgccgttcccagcagacgtcttcatggtgccacagtatggatacctcaccctgaacaacgggagtcaggcggtaggacgctcttcattttactgcctggagtacttcccttctcagatgcttcgcacgggaaacaactttaccttcagctacacctttgaggacgtgccttttcacagcagctacgctcacagccaaagtctggaccgtctcatgaatcctctcatcgaccaatacctgtattacttgagcaaaacaaacgctccaagcggaaccaccacgatgtccaggcttcagttttctcaggccggagcgagtgacattcgggaccagtctagaaactggcttcctggaccctgttaccgccagcagcgagtatcaaagacagctgcggacaacaacaacagtgattactcgtggactggagctaccaagtaccacctcaatggaagagactctctggtgaacccgggcccagctatggccagccacaaggatgatgaagaaaaatattttcctcagagcggggttctcatcttcgggaaacaaggctcaaataaaactaatgtggacattgaaaaggttatgattacagacgaagaggaaatcaggaccaccaatcccgtggctacggagcagtatggttctgtatctaccaaccttcaaagcggcaacacacaagcagctacctcagatgtcaacacacaaggcgttcttcctggcatggtctggcaggacagagatgtgtacctgcaggggcccatctgggcaaagattcctcacacggacggacactttcacccttctcccctcatgggcggatttggattgaagcaccctcccccacagattctcatcaagaataccccggtacctgcgaatccttcgaccaccttcagtgcggcaaagtttgcttccttcatcacacagtattccacgggacaggtcagcgtggagatagagtgggagctgcagaaggagaacagcaaacgctggaaccccgagatccagtatacttccaactacaacaaatctgttaatgtggactttactgtggacactaatggtgtgtattcagagcctcgccccattggcaccagatacctgactcgtaatctgtaa

SEQ ID NO: 3526 - DNA, 2208 bp, Artificial Sequence
  source: /note="Description of Artificial Sequence: Synthetic polynucleotide"
atggctgccgatggttatcttccagattggctcgaggacactctctctgaaggaataagacagtggtggaagctcaaacctggcccaccaccgccaaagcccgcagagcggcataaggacgacagcaggggtcttgtgcttcctgggtacaagtacctcggacccttcaacggactcgacaagggggagccggtcaacgaggcagacgccgcggccctcgagcacgacaaggcctacgaccggcagctcgacagcggagacaacccgtacctcaagtacaaccacgccgacgcggagtttcaggagcgtcttaaagaagatacgtcttttgggggcaacctcggacgagcagtcttccaggcgaaaaagagggttcttgaacctctgggcctggttgaggaacctgttaagacggctccgggaaaaaagaggccggtagagcactctcctgtggagccagactcctcctcgggaaccggaaaggcgggccagcagcctgcaagaaaaagattgaatttcggtcagactggagacgcagactccgtacctgacccccagcctctcggacagccaccagcagccccctctggtctgggaactaatacgatggctacaggcagtggcacaccaatggcagacaataacgagggcgccgacggagtgggtaattcctcgggaaattggcattgcgattccacatggatgggcgacagagtcatcaccaccagcacccgcacctgggctctgcccacctacaacaaccatctgtacaagcaaatttccagccaatcaggagcatcgaacgacaaccactactttggctacagcaccccctgggggtattttgacttcaacagattccactgccacttttcgccacgtgactggcaaagactcatcaacaacaactggggattccggcccaagagactcagcttcaagctctttaacattcaagtcaaggaggtcacgcagaatgacggtacgacgacgattgccaataaccttaccagcacggttcaggtctttactgactcggagtaccagctcccgtacgtcctcggctcggcgcatcaaggatgcctcccgccgttcccagcagacgtcttcatggtgccacagtatggatacctcaccctgaacaacgggagtcaggcggtaggacgctcttcattttactgcctggagtacttcccttctcagatgcttcgcacgggaaacaactttaccttcagctacacctttgaggacgtgccttttcacagcagctacgctcacagccaaagtctggaccgtctcatgaatcctctcatcgaccaatacctgtattacttgagcaaaacaaacgctccaagcggaaccaccacgatgtccaggcttcagttttctcaggccggagcgagtgacattcgggaccagtctagaaactggcttcctggaccctgttaccgccagcagcgagtatcaaagacagctgcggacaacaacaacagtgattactcgtggactggagctaccaagtaccacctcaatggaagagactctctggtgaacccgggcccagctatggccagccacaaggatgatgaagaaaaatattttcctcagagcggggttctcatcttcgggaaacaaggctcaaataaaactaatgtggacattgaaaaggttatgattacagacgaagaggaaatcaggaccaccaatcccgtggctacggagcagtatggttctgtatctaccaaccttcaaagcggcaacacacaagcagctacctcagatgtcaacacacaaggcgttcttcctggcatggtctggcaggacagagatgtgtacctgcaggggcccatctgggcaaagattcctcacacggacggacactttcacccttctcccctcatgggcggatttggattgaagcaccctcccccacagattctcatcaagaataccccggtacctgcgaatccttcgaccaccttcagtgcggcaaagtttgcttccttcatcacacagtattccacgggacaggtcagcgtggagatagagtgggagctgcagaaggagaacagcaaacgctggaaccccgagatccagtatacttccaactacaacaaatctgttaatgtggactttactgtggacactaatggtgtgtattcagagcctcgccccattggcaccagatacctgactcgtaatctgtaa

SEQ ID NO: 3527 - DNA, 2208 bp, Artificial Sequence
  source: /note="Description of Artificial Sequence: Synthetic polynucleotide"
atggctgccgatggttatcttccagattggctcgaggacactctctctgaaggaataagacagtggtggaagctcaaacctggcccaccaccgccaaagcccgcagagcggcataaggacgacagcaggggtcttgtgcttcctgggtacaagtacctcggacccttcaacggactcgacaagggggagccggtcaacgaggcagacgccgcggccctcgagcacgacaaggcctacgaccggcagctcgacagcggagacaacccgtacctcaagtacaaccacgccgacgcggagtttcaggagcgtcttaaagaagatacgtcttttgggggcaacctcggacgagcagtcttccaggcgaaaaagagggttcttgaacctctgggcctggttgaggaacctgttaagacggctccgggaaaaaagaggccggtagagcactctcctgtggagccagactcctcctcgggaaccggaaaggcgggccagcagcctgcaagaaaaagattgaatttcggtcagactggagacgcagactccgtacctgacccccagcctctcggacagccaccagcagccccctctggtctgggaactaatacgatggctacaggcagtggcgcaccaatggcagacaataacgagggcgccgacggagtgggtaattcctcgggaaattggcattgcgattccacatggatgggcgacagagtcatcaccaccagcacccgcacctgggctctgtccacctacaacaaccatctgtacaagcaaatttccagccaatcaggagcatcgaacgacaaccactactttggctacagcaccccctgggggtattttgacttcaacagattccactgccacttttcgccacgtgactggcaaagactcatcaacaacaactggggattccggcccaagagactcagcttcaagctctttaacattcaagtcaaggaggtcacgcagaatgacggtacgacgacgattgccaataaccttaccagcacggttcaggtctttactgactcggagtaccagctcccgtacgtcctcggctcggcgcatcaaggatgcctcccgccgttcccagcagacgtcttcatggtgccacagtatggatacctcaccctgaacaacgggagtcaggcggtaggacgctcttcattttactgcctggagtacttcccttctcagatgcttcgcacgggaaacaactttaccttcagctacacctttgaggacgtgccttttcacagcagctacgctcacagccaaagtctggaccgtctcatgaatcctctcatcgaccaatacctgtattacttgagcaaaacaaacgctccaagcggaaccaccacgatgtccaggcttcagttttctcaggccggagcgagtgacattcgggaccagtctagaaactggcttcctggaccctgttaccgccagcagcgagtatcaaagacagctgcggacaacaacaacagtgattactcgtggactggagctaccaagtaccacctcaatggaagagactctctggtgaacccgggcccagctatggccagccacaaggatgatgaagaaaaatattttcctcagagcggggttctcatcttcgggaaacaaggctcaaataaaactaatgtggacattgaaaaggttatgattacagacgaagaggaaatcaggaccaccaatcccgtggctacggagcagtatggttctgtatctaccaaccttcaaagcggcaacacacaagcagctacctcagatgtcaacacacaaggcgttcttcctggcatggtctggcaggacagagatgtgtacctgcaggggcccatctgggcaaagattcctcacacggacggacactttcacccttctcccctcatgggcggatttggattgaagcaccctcccccacagattctcatcaagaataccccggtacctgcgaatccttcgaccaccttcagtgcggcaaagtttgcttccttcatcacacagtattccacgggacaggtcagcgtggagatagagtgggagctgcagaaggagaacagcaaacgctggaaccccgagatccagtatacttccaactacaacaaatctgttaatgtggactttactgtggacactaatggtgtgtattcagagcctcgccccattggcaccagatacctgactcgtaatctgtaa

SEQ ID NO: 3528 - DNA, 2208 bp, Artificial Sequence
  source: /note="Description of Artificial Sequence: Synthetic polynucleotide"
atggctgccgatggttatcttccagattggctcgaggacactctctctgaaggaataagacagtggtggaagctcaaacctggcccaccaccgccaaagcccgcagagcggcataaggacgacagcaggggtcttgtgcttcctgggtacaagtacctcggacccttcaacggactcgacaagggggagccggtcaacgaggcagacgccgcggccctcgagcacgacaaggcctacgaccggcagctcgacagcggagacaacccgtacctcaagtacaaccacgccgacgcggagtttcaggagcgtcttaaagaagatacgtcttttgggggcaacctcggacgagcagtcttccaggcgaaaaagagggttcttgaacctctgggcctggttgaggaacctgttaagacggctccgggaaaaaagaggccggtagagcactctcctgtggagccagactcctcctcgggaaccggaaaggcgggccagcagcctgcaagaaaaagattgaatttcggtcagactggagacgcagactccgtacctgacccccagcctctcggacagccaccagcagccccctctggtctgggaactaatacgatggctacaggcagtggcgcaccaatggcagacaataacgagggcgccgacggagtgggtaattcctcgggaaattggcattgcgattccacatggatgggcgacagagtcatcaccaccagcacccgcacctgggctctgcccacctacaacaaccatctgtacaagcaaatttccagccaatcaggagcatcgaacgacaaccactactttggctacagcaccccctgggggtattttgacttcaacagattccactgccacttttcgccacgtgactggcaaagactcatcaacaacaactggggattccggcccaagagactcagcttcaagctctttaacattcaagtcaaggaggtcacgcagaatgacggtacgacgacgattgccaataaccttaccagcacggttcaggtctttactgactcggagtaccagctcccgtacgtcctcggctcggcgcatcaaggatgcctcccgccgttcccagcagacgtcttcatggtgccacagtatggatacctcaccctgaacaacgggagtcaggcggtaggacgctcttcattttactgcctggagtacttcccttctcagatgcttcgcacgggaaacaactttaccttcagctacacctttgaggacgtgccttttcacagcagctacgctcacagccaaagtctggaccgtctcatgaatcctctcatcgaccaatacctgtattacttgagcaaaacaaacgctccaagcggaaccaccacgatgtccaggcttcagttttctcaggccggagcgagtgacattcgggaccagtctagaaactggcttcctggaccctgttaccgccagcagcgagtatcaaagacagctgtggacaacaacaacagtgattactcgtggactggagctaccaagtaccacctcaatggaagagactctctggtgaacccgggcccagctatggccagccacaaggatgatgaagaaaaatattttcctcagagcggggttctcatcttcgggaaacaaggctcaaataaaactaatgtggacattgaaaaggttatgattacagacgaagaggaaatcaggaccaccaatcccgtggctacggagcagtatggttctgtatctaccaaccttcaaagcggcaacacacaagcagctacctcagatgtcaacacacaaggcgttcttcctggcatggtctggcaggacagagatgtgtacctgcaggggcccatctgggcaaagattcctcacacggacggacactttcacccttctcccctcatgggcggatttggattgaagcaccctcccccacagattctcatcaagaataccccggtacctgcgaatccttcgaccaccttcagtgcggcaaagtttgcttccttcatcacacagtattccacgggacaggtcagcgtggagatagagtgggagctgcagaaggagaacagcaaacgctggaaccccgagatccagtatacttccaactacaacaaatctgttaatgtggactttactgtggacactaatggtgtgtattcagagcctcgccccattggcaccagatacctgactcgtaatctgtaa

SEQ ID NO: 3529 - DNA, 2208 bp, Artificial Sequence
  source: /note="Description of Artificial Sequence: Synthetic polynucleotide"
atggctgccgatggttatcttccagattggctcgaggacactctctctgaaggaataagacagtggtggaagctcaaacctggcccaccaccgccaaagcccgcagagcggcataaggacgacagcaggggtcttgtgcttcctgggtacaagtacctcggacccttcaacggactcgacaagggggagccggtcaacgaggcagacgccgcggccctcgagcacgacaaggcctacgaccggcagctcgacagcggagacaacccgtacctcaagtacaaccacgccgacgcggagtttcaggagcgtcttaaagaagatacgtcttttgggggcaacctcggacgagcagtcttccaggcgaaaaagagggttcttgaacctctgggcctggttgaggaacctgttaagacggctccgggaaaaaagaggccggtagagcactctcctgtggagccagactcctcctcgggaaccggaaaggcgggccagcagcctgcaagaaaaagattgaatttcggtcagactggagacgcagactccgtacctgacccccagcctctcggacagccaccagcagccccctctggtctgggaactaatacgatggctacaggcagtggcgcaccaatggcagacaataacgagggcgccgacggagtgggtaattcctcgggaaattggcattgcgattccacatggatgggcgacagagtcatcaccaccagcacccgcacctgggctctgcccacctacaacaaccatctgtacaagcaaatttccagccaatcaggagcatcgaacgacaaccactactttggctacagcaccccctgggggtattttgacttcaacagattccactgccacttttcgccacgtgactggcaaagactcatcaacaacaactggggattccggcccaagagactcagcttcaagctctttaacattcaagtcaaggaggtcacgcagaatgacggtacgacgacgattgccaataaccttaccagcacggttcaggtctttactgactcggagtaccagctcccgtacgtcctcggctcggcgcatcaaggatgcctcccgccgttcccagcagacgtcttcatggtgccacagtatggatacctcaccctgaacaacgggagtcaggcggtaggacgctcttcattttactgcctggagtacttcccttctcagatacttcgcacgggaaacaactttaccttcagctacacctttgaggacgtgccttttcacagcagctacgctcacagccaaagtctggaccgtctcatgaatcctctcatcgaccaatacctgtattacttgagcaaaacaaacgctccaagcggaaccaccacgatgtccaggcttcagttttctcaggccggagcgagtgacattcgggaccagtctagaaactggcttcctggaccctgttaccgccagcagcgagtatcaaagacagctgcggacaacaacaacagtgattactcgtggactggagctaccaagtaccacctcaatggaagagactctctggtgaacccgggcccagctatggccagccacaaggatgatgaagaaaaatattttcctcagagcggggttctcatcttcgggaaacaaggctcaaataaaactaatgtggacattgaaaaggttatgattacagacgaagaggaaatcaggaccaccaatcccgtggctacggagcagtatggttctgtatctaccaaccttcaaagcggcaacacacaagcagctacctcagatgtcaacacacaaggcgttcttcctggcatggtctggcaggacagagatgtgtacctgcaggggcccatctgggcaaagattcctcacacggacggacactttcacccttctcccctcatgggcggatttggattgaagcaccctcccccacagattctcatcaagaataccccggtacctgcgaatccttcgaccaccttcagtgcggcaaagtttgcttccttcatcacacagtattccacgggacaggtcagcgtggagatagagtgggagctgcagaaggagaacagcaaacgctggaaccccgagatccagtatacttccaactacaacaaatctgttaatgtggactttactgtggacactaatggtgtgtattcagagcctcgccccattggcaccagatacctgactcgtaatctgtaa

SEQ ID NO: 3530 - DNA, 2208 bp, Artificial Sequence
  source: /note="Description of Artificial Sequence: Synthetic polynucleotide"
atggctgccgatggttatcttccagattggctcgaggacactctctctgaaggaataagacagtggtggaagctcaaacctggcccaccaccgccaaagcccgcagagcggcataaggacgacagcaggggtcttgtgcttcctgggtacaagtacctcggacccttcaacggactcgacaagggggagccggtcaacgaggcagacgccgcggccctcgagcacgacaaggcctacgaccggcagctcgacagcggagacaacccgtacctcaagtacaaccacgccgacgcggagtttcaggagcgtcttaaagaagatacgtcttttgggggcaacctcggacgagcagtcttccaggcgaaaaagagggttcttgaacctctgggcctggttgaggaacctgttaagacggctccgggaaaaaagaggccggtagagcactctcctgtggagccagactcctcctcgggaaccggaaaggtgggccagcagcctgcaagaaaaagattgaatttcggtcagactggagacgcagactccgtacctgacccccagcctctcggacagccaccagcagccccctctggtctgggaactaatacgatggctacaggcagtggcgcaccaatggcagacaataacgagggcgccgacggagtgggtaattcctcgggaaattggcattgcgattccacatggatgggcgacagagtcatcaccaccagcacccgcacctgggctctgcccacctacaacaaccatctgtacaagcaaatttccagccaatcaggagcatcgaacgacaaccactactttggctacagcaccccctgggggtattttgacttcaacagattccactgccacttttcgccacgtgactggcaaagactcatcaacaacaactggggattccggcccaagagactcagcttcaagctctttaacattcaagtcaaggaggtcacgcagaatgacggtacgacgacgattgccaataaccttaccagcacggttcaggtctttactgactcggagtaccagctcccgtacgtcctcggctcggcgcatcaaggatgcctcccgccgttcccagcagacgtcttcatggtgccacagtatggatacctcaccctgaacaacgggagtcaggcggtaggacgctcttcattttactgcctggagtacttcccttctcagatgcttcgcacgggaaacaactttaccttcagctacacctttgaggacgtgccttttcacagcagctacgctcacagccaaagtctggaccgtctcatgaatcctctcatcgaccaatacctgtattacttgagcaaaacaaacgctccaagcggaaccaccacgatgtccaggcttcagttttctcaggccggagcgagtgacattcgggaccagtctagaaactggcttcctggaccctgttaccgccagcagcgagtatcaaagacagctgcggacaacaacaacagtgattactcgtggactggagctaccaagtaccacctcaatggaagagactctctggtgaacccgggcccagctatggccagccacaaggatgatgaagaaaaatattttcctcagagcggggttctcatcttcgggaaacaaggctcaaataaaactaatgtggacattgaaaaggttatgattacagacgaagaggaaatcaggaccaccaatcccgtggctacggagcagtatggttctgtatctaccaaccttcaaagcggcaacacacaagcagctacctcagatgtcaacacacaaggcgttcttcctggcatggtctggcaggacagagatgtgtacctgcaggggcccatctgggcaaagattcctcacacggacggacactttcacccttctcccctcatgggcggatttggattgaagcaccctcccccacagattctcatcaagaataccccggtacctgcgaatccttcgaccaccttcagtgcggcaaagtttgcttccttcatcacacagtattccacgggacaggtcagcgtggagatagagtgggagctgcagaaggagaacagcaaacgctggaaccccgagatccagtatacttccaactacaacaaatctgttaatgtggactttactgtggacactaatggtgtgtattcagagcctcgccccattggcaccagatacctgactcgtaatctgtaa

SEQ ID NO: 3531 - DNA, 2208 bp, Artificial Sequence
  source: /note="Description of Artificial Sequence: Synthetic polynucleotide"
atggctgccgatggttatcttccagattggctcgaggacactctctctgaaggaataagacagtggtggaagctcaaacctggcccaccaccgccaaagcccgcagagcggcataaggacgacagcaggggtcttgtgcttcctgggtacaagtacctcggacccttcaacggactcgacaagggggagccggtcaacgaggcagacgccgcggccctcgagcacgacaaggcctacgaccggcagctcgacagcggagacaacccgtacctcaagtacaaccacgccgacgcggagtttcaggagcgtcttaaagaagatacgtcttttgggggcaacctcggacgagcagtcttccaggcgaaaaagagggttcttgaacctctgggcctggttgaggaacctgttaagacggctccgggaaaaaagaggccggtagagcactctcctgtggagccagactcctcctcgggaaccggaaaggcgggccagcagcctgcaagaaaaagattgaatttcggtcagactggagacgcagactccgtacctgacccccagcctctcggacagccaccagcagccccctctggtctgggaactaatacgatggctgcaggcagtggcgcaccaatggcagacaataacgagggcgccgacggagtgggtaattcctcgggaaattggcattgcgattccacatggatgggcgacagagtcatcaccaccagcacccgcacctgggctctgcccacctacaacaaccatctgtacaagcaaatttccagccaatcaggagcatcgaacgacaaccactactttggctacagcaccccctgggggtattttgacttcaacagattccactgccacttttcgccacgtgactggcaaagactcatcaacaacaactggggattccggcccaagagactcagcttcaagctctttaacattcaagtcaaggaggtcacgcagaatgacggtacgacgacgattgccaataaccttaccagcacggttcaggtctttactgactcggagtaccagctcccgtacgtcctcggctcggcgcatcaaggatgcctcccgccgttcccagcagacgtcttcatggtgccacagtatggatacctcaccctgaacaacgggagtcaggcggtaggacgctcttcattttactgcctggagtacttcccttctcagatgcttcgcacgggaaacaactttaccttcagctacacctttgaggacgtgccttttcacagcagctacgctcacagccaaagtctggaccgtctcatgaatcctctcatcgaccaatacctgtattacttgagcaaaacaaacgctccaagcggaaccaccacgatgtccaggcttcagttttctcaggccggagcgagtgacattcgggaccagtctagaaactggcttcctggaccctgttaccgccagcagcgagtatcaaagacagctgcggacaacaacaacagtgattactcgtggactggagctaccaagtaccacctcaatggaagagactctctggtgaacccgggcccagctatggccagccacaaggatgatgaagaaaaatattttcctcagagcggggttctcatcttcgggaaacaaggctcaaataaaactaatgtggacattgaaaaggttatgattacagacgaagaggaaatcaggaccaccaatcccgtggctacggagcagtatggttctgtatctaccaaccttcaaagcggcaacacacaagcagctacctcagatgtcaacacacaaggcgttcttcctggcatggtctggcaggacagagatgtgtacctgcaggggcccatctgggcaaagattcctcacacggacggacactttcacccttctcccctcatgggcggatttggattgaagcaccctcccccacagattctcatcaagaataccccggtacctgcgaatccttcgaccaccttcagtgcggcaaagtttgcttccttcatcacacagtattccacgggacaggtcagcgtggagatagagtgggagctgcagaaggagaacagcaaacgctggaaccccgagatccagtatacttccaactacaacaaatctgttaatgtggactttactgtggacactaatggtgtgtattcagagcctcgccccattggcaccagatacctgactcgtaatctgtaa

SEQ ID NO: 3532 - DNA, 2208 bp, Artificial Sequence
  source: /note="Description of Artificial Sequence: Synthetic polynucleotide"
atggctgccgatggttatcttccagattggctcgaggacactctctctgaaggaataagacagtggtggaagctcaaacctggcccaccaccgccaaagcccgcagagcggcataaggacgacagcaggggtcttgtgcttcctgggtacaagtacctcggacccttcaacggactcgacaagggggagccggtcaacgaggcagacgccgcggccctcgagcacgacaaggcctacgaccggcagctcgacagcggagacaacccgtacctcaagtacaaccacgccgacgcggagtttcaggagcgtcttaaagaagatacgtcttttgggggcaacctcggacgagcagtcttccaggcgaaaaagagggttcttgaacctctgggcctggttgaggaacctgttaagacggctccgggaaaaaagaggccggtagagcactctcctgtggagccagactcctcctcgggaaccggaaaggcgggccagcagcctgcaagaaaaagattgaatttcggtcagactggagacgcagactccgtacctgacccccagcctctcggacagccaccagcagccccctctggtctgggaactaatacgatggctacaggcagtggcgcaccaatggcagacaataacgagggcgccgacggagtgggtaattcctcgggaaattggcattgcgattccacatggatgggcgacagagtcatcaccaccagcacccgcacctgggctctgcccacctacaacaaccatctgtacaagcaaatttccagccaatcaggagcatcgaacgacaaccactactttggctacagcaccccctgggggtattttgacttcaacagattccactgccacttttcgccacgtgactggcaaagactcatcaacaacaactggggattccggcccaagagactcagcttcaagctctttaacattcaagtcaaggaggtcacgcagaatgacggtacgacgacgattgccaataaccttaccagcacggttcaggtctttactgactcggagtaccagctcccgtacgtcctcggctcggcgcatcaaggatgcctcccgccgttcccagcagacgtcttcatggtgccacagtatggatacctcaccctgaacaacgggagtcaggcggtaggacgctcttcattttactgcctggagtacttcccttctcagatgcttcgcacgggaaacaactttaccttcagctacacctttgaggacgtgccttttcacagcagctacgctcacagccaaagtctggaccgtctcatgaatcctctcatcgaccaatacctgtattacttgagcaaaacaaacgctccaagcggaaccaccacgatgtccaggcttcagttttctcaggccggagcgagtgacattcgggaccagtctagaaactggcttcctggaccctgttaccgccagcagcgagtatcaaagacagctgcggacaacaacaacagtgattactcgtggactggagctaccaagtaccacctcaatggaagagactctctggtgaacccgggcccagctatggccagccacaaggatgatgaagaaaaatattttcctcagagcggggttctcatcttcgggaaacaaggctcaaataaaactaatgtggacattgaaaaggttatgattacagacgaagaggaaatcaggaccaccaatcccgtggctacggagcagtatggttctgtatctaccaaccttcaaagcgacaacacacaagcagctacctcagatgtcaacacacaaggcgttcttcctggcatggtctggcaggacagagatgtgtacctgcaggggcccatctgggcaaagattcctcacacggacggacactttcacccttctcccctcatgggcggatttggattgaagcaccctcccccacagattctcatcaagaataccccggtacctgcgaatccttcgaccaccttcagtgcggcaaagtttgcttccttcatcacacagtattccacgggacaggtcagcgtggagatagagtgggagctgcagaaggagaacagcaaacgctggaaccccgagatccagtatacttccaactacaacaaatctgttaatgtggactttactgtggacactaatggtgtgtattcagagcctcgccccattggcaccagatacctgactcgtaatctgtaa

SEQ ID NO: 3533 - DNA, 2208 bp, Artificial Sequence
  source: /note="Description of Artificial Sequence: Synthetic polynucleotide"
atggctgccgatggttatcttccagattggctcgaggacactctctctgaaggaataagacagtggtggaagctcaaacctggcccaccaccgccaaagcccgcagagcggcataaggacgacagcaggggtcttgtgcttcctgggtacaagtacctcggacccttcaacggactcgacaagggggagccggtcaacgaggcagacgccgcggccctcgagcacgacaaggcctacgaccggcagctcgacagcggagacaacccgtacctcaagtacaaccacgccgacgcggagtttcaggagcgtcttaaagaagatacgtcttttgggggcaacctcggacgagcagtcttccaggcgaaaaagagggttcttgaacctctgggcctggttgaggaacctgttaagacggctccgggaaaaaagaggccggtagagcactctcctgtggagccagactcctcctcgggaaccggaaaggcgggccagcagcctgcaagaaaaagattgaatttcggtcagactggagacgcagactccgtacctgacccccagcctctcggacagccaccagcagccccctctggtctgggaactaatacgatggctacaggcagtggcgcaccaatggcagacaataacgagggcgccgacggagtgggtaattcctcgggaaattggcattgcgattccacatggatgggcgacagagtcatcaccaccagcacccgcacctgggctctgcccacctacaacaaccatctgtacaagcaaatttccagccaatcaggagcatcgaacgacaaccactactttggctacagcaccccctgggggtattttgacttcaacagattccactgccacttttcgccacgtgactggcaaagactcatcaacaacaactggggattccggcccaagagactcagcttcaagctctttaacattcaagtcaaggaggtcacgcagaatgacggtaygacgacgattgccaataaccttaccagcacggttcaggtctttactgactcggagtaccagctcccgtacgtcctcggctcggcgcatcaaggatgcctcccgccgttcccagcagacgtcttcatggtgccacagtatggatacctcaccctgaacaacgggagtcaggcggtaggacgctcttcattttactgcctggagtacttcccttctcagatgcttcgcacgggaaacaactttaccttcagctacacctttgaggacgtgccttttcacagcagctacgctcacagccaaagtctggaccgtctcatgaatcctctcatcgaccaatacctgtattacttgagcaaaacaaacgctccaagcggaaccaccacgatgtccaggcttcagttttctcaggccggagcgagtgacattcgggaccagtctagaaactggcttcctggaccctgttaccgccagcagcgagtatcaaagacagctgcggacaacaacaacagtgattactcgtggactggagctaccaagtaccacctcaatggaagagactctctggtgaacccgggcccagctatggccagccacaaggatgatgaagaaaaatattttcctcagagcggggttctcatcttcgggaaacaaggctcaaataaaactaatgtggacattgaaaaggttatgattacagacgaagaggaaatcaggaccaccaatcccgtggctacggagcagtatggttctgtatctaccaaccttcaaagcggcaacacacaagcagctacctcagatgtcaacacacaaggcgttcttcctggcatggtctggcaggacagagatgtgtacctgcaggggcccatctgggcaaagattcctcacacggacggacactttcacccttctcccctcatgggcggatttggattgaagcaccctcccccacagattctcatcaagaataccccggtacctgcgaatccttcgaccaccttcagtgcggcaaagtttgcttccttcatcacacagtattccacgggacaggtcagcgtggagatagagtgggagctgcagaaggagaacagcaaacgctggaaccccgagatccagtatacttccaactacaacaaatctgttaatgtggactttactgtggacactaatggtgtgtattcagagcctcgccccattggcaccagatacctgactcgtaatctgtaa

SEQ ID NO: 3534 - DNA, 2208 bp, Artificial Sequence
  source: /note="Description of Artificial Sequence: Synthetic polynucleotide"
atggctgccgatggttatcttccagattggctcgaggacactctctctgaaggaataagacagtggtggaagctcaaacctggcccaccaccgccaaagcccgcagagcggcataaggacgacagcaggggtcttgtgcttcctgggtacaagtacctcggacccttcaacggactcgacaagggggagccggtcaacgaggcagacgccgcggccctcgagcacgacaaggcctacgaccggcagctcgacagcggagacaacccgtacctcaagtacaaccacgccgacgcggagtttcaggagcgtcttaaagaagatacgtcttttgggggcaacctcggacgagcagtcttccaggcgaaaaagagggttcttgaacctctgggcctggttgaggaacctgttaagacggctccgggaaaaaagaggccggtagagcactctcctgtggagccagactcctcctcgggaaccggaaaggcgggccagcagcctgcaagaaaaagattgaatttcggtcagactggagacgcagactccgtacctgacccccagcctctcggacagccaccagcagccccctctggtctgggaactaatacgatggctacaggcagtggcgcaccaatggcagacaataacgagggcgccgacggagtgggtaattcctcgggaaattggcattgcgattccacatggatgggcgacagagtcatcaccaccagcacccgcacctgggctctgcccacctacaacaaccatctgtacaagcaaatttccagccaatcaggagcatcgaacgacaaccactactttggctacagcaccccctgggggtattttgacttcaacagattccactgccacttttcgccacgtgactggcaaagactcatcaacaacaactggggattccggcccaagagactcagcttcaagctctttaacattcaagtcaaggaggtcacgcagaatgacggtacgacgacgattgccaataaccttaccagcacggttcaggtctttactgactcggagtaccagctcccgtacgtcctcggctcggcgcatcaaggatgcctcccgccgttcccagcagacgtcttcatggtgccacagtatggatacctcaccctgaacaacgggagtcaggcggtaggacgctcttcattttactgcctggagtacttcccttctcagatgcttcgcacgggaaacaactttaccttcagctacacctttgaggacgtgccttttcacagcagctacgctcacagccaaagtctggaccgtctcatgaatcctctcatcgaccaatacctgtattacttgagcaaaacaaacgctccaagcggaaccaccacgatgtccaggcttcagttttctcaggccggagcgagtgacattcgggaccagtctagaaactggcttcctggaccctgttaccgccagcagcgagtatcaaagacagctgcggacaacaacaacagtgattactcgtggactggagctaccaagtaccacctcaatggaagagactctctggtgaacccgggcccagctatggccagccacaaggatgatgaagaaaaatattttcctcagagcggggttctcatcttcgggaaacaaggctcaaataaaactaatgtggacattgaaaaggttatgattacagacgaagaggaaatcaggaccaccaatcccgtggctacggagcagtatggttctgtatctaccaaccttcaaagcggcaacacacaagcagctacctcagatgtcaacacacaaggcgttcttcctggcatggtctggcaggacagagatgtgtacctgcaggggcccatctgggcaaagattcctcacacggacggacactttcacccttctcccctcatgggcggatttggattgaagcaccctcccccacagattctcatcaagaataccccggtacctgcgaatccttcgaccaccttcagtgcggcaaagtttgcttccttcatcacacagtattccacgggacaggtcagcgtggagatagagtgggagctgcagaaggagaacagcaaacgctggaaccccgagatccagtatacttccaactacaacaaatctgttaatgtggactttactgtggacactaatggtgtgtattcagagcctcgccccattgacaccagatacctgactcgtaatctgtaa

SEQ ID NO: 3535 - DNA, 2208 bp, Artificial Sequence
  source: /note="Description of Artificial Sequence: Synthetic polynucleotide"
atggctgccgatggttatcttccagattggctcgaggacactctctctgaaggaataagacagtggtggaagctcaaacctggcccaccaccgccaaagcccgcagagcggcataaggacgacagcaggggtcttgtgcttcctgggtacaagtacctcggacccttcaacggactcgacaagggggagccggtcaacgaggcagacgccgcggccctcgagcacgacaaggcctacgaccggcagctcgacagcggagacaacccgtacctcaagtacaaccacgccgacgcggagtttcaggagcgtcttaaagaagatacgtcttttgggggcaacctcggacgagcagtcttccaggcgaaaaagagggttcttgaacctctgggcctggttgaggaacctgttaagacggctccgggaaaaaagaggccggtagagcactctcctgtggagccagactcctcctcgggaaccggaaaggcgggccagcagcctgcaagaaaaagattgaatttcggtcagactggagacacagactccgtacctgacccccagcctctcggacagccaccagcagccccctctggtctgggaactaatacgatggctacaggcagtggcgcaccaatggcagacaataacgagggcgccgacggagtgggtaattcctcgggaaattggcattgcgattccacatggatgggcgacagagtcatcaccaccagcacccgcacctgggctctgcccacctacaacaaccatctgtacaagcaaatttccagccaatcaggagcatcgaacgacaaccactactttggctacagcaccccctgggggtattttgacttcaacagattccactgccacttttcgccacgtgactggcaaagactcatcaacaacaactggggattccggcccaagagactcagcttcaagctctttaacattcaagtcaaggaggtcacgcagaatgacggtacgacgacgattgccaataaccttaccagcacggttcaggtctttactgactcggagtaccagctcccgtacgtcctcggctcggcgcatcaaggatgcctcccgccgttcccagcagacgtcttcatggtgccacagtatggatacctcaccctgaacaacgggagtcaggcggtaggacgctcttcattttactgcctggagtacttcccttctcagatgcttcgcacgggaaacaactttaccttcagctacacctttgaggacgtgccttttcacagcagctacgctcacagccaaagtctggaccgtctcatgaatcctctcatcgaccaatacctgtattacttgagcaaaacaaacgctccaagcggaaccaccacgatgtccaggcttcagttttctcaggccggagcgagtgacattcgggaccagtctagaaactggcttcctggaccctgttaccgccagcagcgagtatcaaagacagctgcggacaacaacaacagtgattactcgtggactggagctaccaagtaccacctcaatggaagagactctctggtgaacccgggcccagctatggccagccacaaggatgatgaagaaaaatattttcctcagagcggggttctcatcttcgggaaacaaggctcaaataaaactaatgtggacattgaaaaggttatgattacagacgaagaggaaatcaggaccaccaatcccgtggctacggagcagtatggttctgtatctaccaaccttcaaagcggcaacacacaagcagctacctcagatgtcaacacacaaggcgttcttcctggcatggtctggcaggacagagatgtgtacctgcaggggcccatctgggcaaagattcctcacacggacggacactttcacccttctcccctcatgggcggatttggattgaagcaccctcccccacagattctcatcaagaataccccggtacctgcgaatccttcgaccaccttcagtgcggcaaagtttgcttccttcatcacacagtattccacgggacaggtcagcgtggagatagagtgggagctgcagaaggagaacagcaaacgctggaaccccgagatccagtatacttccaactacaacaaatctgttaatgtggactttactgtggacactaatggtgtgtattcagagcctcgccccattggcaccagatacctgactcgtaatctgtaa

SEQ ID NO: 3536 - DNA, 2208 bp, Artificial Sequence
  source: /note="Description of Artificial Sequence: Synthetic polynucleotide"
atggctgccgatggttatcttccagattggctcgaggacactctctctgaaggaataagacagtggtggaagctcaaacctggcccaccaccgccaaagcccgcagagcggcataaggacgacagcaggggtcttgtgcttcctgggtacaagtacctcggacccttcaacggactcgacaagggggagccggtcaacgaggcagacgccgcggccctcgagcacgacaaggcctacgaccggcagctcgacagcggagacaacccgtacctcaagtacaaccacgccgacgcggagtttcaggagcgtcttaaagaagatacgtcttttgggggcaacctcggacgagcagtcttccaggcgaaaaagagggttcttgaacctctgggcctggttgaggaacctgttaagacgactccgggaaaaaagaggccggtagagcactctcctgtggagccagactcctcctcgggaaccggaaaggcgggccagcagcctgcaagaaaaagattgaatttcggtcagactggagacgcagactccgtacctgacccccagcctctcggacagccaccagcagccccctctggtctgggaactaatacgatggctacaggcagtggcgcaccaatggcagacaataacgagggcgccgacggagtgggtaattcctcgggaaattggcattgcgattccacatggatgggcgacagagtcatcaccaccagcacccgcacctgggctctgcccacctacaacaaccatctgtacaagcaaatttccagccaatcaggagcatcgaacgacaaccactactttggctacagcaccccctgggggtattttgacttcaacagattccactgccacttttcgccacgtgactggcaaagactcatcaacaacaactggggattccggcccaagagactcagcttcaagctctttaacattcaagtcaaggaggtcacgcagaatgacggtacgacgacgattgccaataaccttaccagcacggttcaggtctttactgactcggagtaccagctcccgtacgtcctcggctcggcgcatcaaggatgcctcccgccgttcccagcagacgtcttcatggtgccacagtatggatacctcaccctgaacaacgggagtcaggcggtaggacgctcttcattttactgcctggagtacttcccttctcagatgcttcgcacgggaaacaactttaccttcagctacacctttgaggacgtgccttttcacagcagctacgctcacagccaaagtctggaccgtctcatgaatcctctcatcgaccaatacctgtattacttgagcaaaacaaacgctccaagcggaaccaccacgatgtccaggcttcagttttctcaggccggagcgagtgacattcgggaccagtctagaaactggcttcctggaccctgttaccgccagcagcgagtatcaaagacagctgcggacaacaacaacagtgattactcgtggactggagctaccaagtaccacctcaatggaagagactctctggtgaacccgggcccagctatggccagccacaaggatgatgaagaaaaatattttcctcagagcggggttctcatcttcgggaaacaaggctcaaataaaactaatgtggacattgaaaaggttatgattacagacgaagaggaaatcaggaccaccaatcccgtggctacggagcagtatggttctgtatctaccaaccttcaaagcggcaacacacaagcagctacctcagatgtcaacacacaaggcgttcttcctggcatggtctggcaggacagagatgtgtacctgcaggggcccatctgggcaaagattcctcacacggacggacactttcacccttctcccctcatgggcggatttggattgaagcaccctcccccacagattctcatcaagaataccccggtacctgcgaatccttcgaccaccttcagtgcggcaaagtttgcttccttcatcacacagtattccacgggacaggtcagcgtggagatagagtgggagctgcagaaggagaacagcaaacgctggaaccccgagatccagtatacttccaactacaacaaatctgttaatgtggactttactgtggacactaatggtgtgtattcagagcctcgccccattggcaccagatacctgactcgtaatctgtaa

SEQ ID NO: 3537 - DNA, 2208 bp, Artificial Sequence
  source: /note="Description of Artificial Sequence: Synthetic polynucleotide"
atggctgccgatggttatcttccagattggctcgaggacactctctctgaaggaataagacagtggtggaagctcaaacctggcccaccaccgccaaagcccgcagagcggcataaggacgacagcaggggtcttgtgcttcctgggtacaagtacctcggacccttcaacggactcgacaagggggagccggtcaacgaggcagacgccgcggccctcgagcacgacaaggcctacgaccggcagctcgacagcggagacaacccgtacctcaagtacaaccacgccgacgcggagtttcaggagcgtcttaaagaagatacgtcttttgggggcaacctcggacgagcagtcttccaggcgaaaaagagggttcttgaacctctgggcctggttgaggaacctgttaagacggctccgggaaaaaagaggccggtagagcactctcctgtggagccagactcctcctcgggaaccggaaaggcgggccagcagcctgcaagaaaaagattgaatttcggtcagactggagacgcagactccgtacctgacccccagcctctcggacagtcaccagcagccccctctggtctgggaactaatacgatggctacaggcagtggcgcaccaatggcagacaataacgagggcgccgacggagtgggtaattcctcgggaaattggcattgcgattccacatggatgggcgacagagtcatcaccaccagcacccgcacctgggctctgcccacctacaacaaccatctgtacaagcaaatttccagccaatcaggagcatcgaacgacaaccactactttggctacagcaccccctgggggtattttgacttcaacagattccactgccacttttcgccacgtgactggcaaagactcatcaacaacaactggggattccggcccaagagactcagcttcaagctctttaacattcaagtcaaggaggtcacgcagaatgacggtacgacgacgattgccaataaccttaccagcacggttcaggtctttactgactcggagtaccagctcccgtacgtcctcggctcggcgcatcaaggatgcctcccgccgttcccagcagacgtcttcatggtgccacagtatggatacctcaccctgaacaacgggagtcaggcggtaggacgctcttcattttactgcctggagtacttcccttctcagatgcttcgcacgggaaacaactttaccttcagctacacctttgaggacgtgccttttcacagcagctacgctcacagccaaagtctggaccgtctcatgaatcctctcatcgaccaatacctgtattacttgagcaaaacaaacgctccaagcggaaccaccacgatgtccaggcttcagttttctcaggccggagcgagtgacattcgggaccagtctagaaactggcttcctggaccctgttaccgccagcagcgagtatcaaagacagctgcggacaacaacaacagtgattactcgtggactggagctaccaagtaccacctcaatggaagagactctctggtgaacccgggcccagctatggccagccacaaggatgatgaagaaaaatattttcctcagagcggggttctcatcttcgggaaacaaggctcaaataaaactaatgtggacattgaaaaggttatgattacagacgaagaggaaatcaggaccaccaatcccgtggctacggagcagtatggttctgtatctaccaaccttcaaagcggcaacacacaagcagctacctcagatgtcaacacacaaggcgttcttcctggcatggtctggcaggacagagatgtgtacctgcaggggcccatctgggcaaagattcctcacacggacggacactttcacccttctcccctcatgggcggatttggattgaagcaccctcccccacagattctcatcaagaataccccggtacctgcgaatccttcgaccaccttcagtgcggcaaagtttgcttccttcatcacacagtattccacgggacaggtcagcgtggagatagagtgggagctgcagaaggagaacagcaaacgctggaaccccgagatccagtatacttccaactacaacaaatctgttaatgtggactttactgtggacactaatggtgtgtattcagagcctcgccccattggcaccagatacctgactcgtaatctgtaa

SEQ ID NO: 3538 - DNA, 2208 bp, Artificial Sequence
  source: /note="Description of Artificial Sequence: Synthetic polynucleotide"
atggctgccgatggttatcttccagattggctcgaggacactctctctgaaggaataagacagtggtggaagctcaaacctggcccaccaccgccaaagcccgcagagcggcataaggacgacagcaggggtcttgtgcttcctgggtacaagtacctcggacccttcaacggactcgacaagggggagccggtcaacgaggcagacgccgcggccctcgagcacgacaaggcctacgaccggcagctcgacagcggagacaacccgtacctcaagtacaaccacgccgacgcggagtttcaggagcgtcttaaagaagatacgtcttttgggggcaacctcggacgagcagtcttccaggcgaaaaagagggttcttgaacctctgggcctggttgaggaacctgttaagacggctccgggaaaaaagaggccggtagagcactctcctgtggagccagactcctcctcgggaaccggaaaggcgggccagcagcctgcaagaaaaagattgaatttcggtcagactggagacgcagactccgtacctgacccccagcctctcggacagccaccagcagccccctctggtctgggaactaatacgatggctacaggcagtggcgcaccaatggcagacaataacgagggcgccgacggagtgggtaattcctcgggaaattggcattgcgattccacatggatgggcgacagagtcatcaccaccagcacccgcacctgggctctgcccacctacaacaaccatctgtacaagcaaatttccagccaatcaggagcatcgaacgacaaccactactttggctacagcaccccctgggggtattttgacttcaacagattccactgccacttttcgccacgtgactggcaaagactcatcaacaacaactggggattccggcccaagagactcagcttcaagctctttaacattcaagtcaaggaggtcacgcagaatgacggtacgacgacgattgccaataaccttaccagcacggttcaggtctttactgactcggagtaccagctcccgtacgtcctcggctcggcgcatcaaggatgcctcccgccgttcccagcagacgtcttcatggtgccacagtatggatacctcaccctgaacaacgggagtcaggcggtaggacgctcttcattttactgcctggagtacttcccttctcagatgcttcgcacgggaaacaactttaccttcagctacacctttgaggacgtgccttttcacagcagctacgctcacagccaaagtctggaccgtctcatgaatcctctcatcgaccaatacctgtattacttgagcaaaacaaacgctccaagcggaaccaccacgatgtccaggcttcagttttctcaggccggagcgagtgacattcgggaccagtctagaaactggcttcctggaccctgttaccgccagcagcgagtatcaaagacagctgcggacaacaacaacagtgattactcgtggactggagctaccaagtaccacctcaatggaagagactctctggtgaacccgggcccagctatggtcagccacaaggatgatgaagaaaaatattttcctcagagcggggttctcatcttcgggaaacaaggctcaaataaaactaatgtggacattgaaaaggttatgattacagacgaagaggaaatcaggaccaccaatcccgtggctacggagcagtatggttctgtatctaccaaccttcaaagcggcaacacacaagcagctacctcagatgtcaacacacaaggcgttcttcctggcatggtctggcaggacagagatgtgtacctgcaggggcccatctgggcaaagattcctcacacggacggacactttcacccttctcccctcatgggcggatttggattgaagcaccctcccccacagattctcatcaagaataccccggtacctgcgaatccttcgaccaccttcagtgcggcaaagtttgcttccttcatcacacagtattccacgggacaggtcagcgtggagatagagtgggagctgcagaaggagaacagcaaacgctggaaccccgagatccagtatacttccaactacaacaaatctgttaatgtggactttactgtggacactaatggtgtgtattcagagcctcgccccattggcaccagatacctgactcgtaatctgtaa

SEQ ID NO: 3539 - DNA, 2208 bp, Artificial Sequence
  source: /note="Description of Artificial Sequence: Synthetic polynucleotide"
atggctgccgatggttatcttccagattggctcgaggacactctctctgaaggaataagacagtggtggaagctcaaacctggcccaccaccgccaaagcccgcagagcggcataaggacgacagcaggggtcttgtgcttcctgggtacaagtacctcggacccttcaacggactcgacaagggggagccggtcaacgaggcagacgccgcggccctcgagcacgacaaggcctacgaccggcagctcgacagcggagacaacccgtacctcaagtacaaccacgccgacgcggagtttcaggagcgtcttaaagaagatacgtcttttgggggcaacctcggacgagcagtcttccaggcgaaaaagagggttcttgaacctctgggcctggttgaggaacctgttaagacggctccgggaaaaaagaggccggtagagcactctcctgtggagccagactcctcctcgggaaccggaaaggcgggccagcagcctgcaagaaaaagattgaatttcggtcagactggagacgcagactccgtacctgacccccagcctctcggacagccaccagcagccccctctggtctgggaactaatacgatggctacaggcagtggcgcaccaatggcagacaataacgagggcgccgacggagtgggtaattcctcgggaaattggcattgcgattccacatggatgggcgacagagtcatcaccaccagcacccgcacctgggctctgcccacctacaacaaccatctgtacaagcaaatttccagccaatcaggagcatcgaacgacaaccactactttggctacagcaccccctgggggtattttgacttcaacagattccactgccacttttcgccacgtgactggcaaagactcatcaacaacaactggggattccggcccaagagactcagcttcaagctctttaacattcaagtcaaggaggtcacgcagaatgacggtacgacgacgattgccaataaccttaccagcacggttcaggtctttactgactcggagtaccagctcccgtacgtcctcggctcggcgcatcaaggatgcctcccgccgttcccagcagacgtcttcatggtgccacagtatggatacctcaccctgaacaacgggagtcaggcggtaggacgctcttcattttactgcctggagtacttcccttctcagatgcttcgcacgggaaacaactttaccttcagctacacctttgaggacgtgccttttcacagcagctacgctcacagccaaagtctggaccgtctcatgaatcctctcatcgaccaatacctgtattacttgagcaaaacaaacgctccaagcggaaccaccacgatgtccaggcttcagttttctcaggccggagcgagtgacattcgggaccagtctagaaactggcttcctggaccctgttaccgccagcagcgagtatcaaagacagctgcggacaacaacaacagtgattactcgtggactggagctaccaagtaccacctcaatggaagagactctctggtgaacccgggcccagctatggccagccacaaggatgatgaagaaaaatattttcctcagagcggggttctcatcttcgggaaacaaggctcaaataaaactaatgtggacattgaaaaggttatgattacagacgaagaggaaatcaggaccaccaatcccgtggctacggagcagtatggttctgtatctaccaaccttcaaagcggcaacacacaagcagctacctcagatgtcaacacacaaggcgttcttcctggcatggtctggcaggacagagatgtgtacctgcaggggcccatctgggcaaagattcctcacacggacggacactttcacccttctcccctcatgggcggatttggattgaagcaccctcccccacagattctcatcaagaataccccggtacctgcgaatccttcgaccaccttcagtgcggcaaagtttgcttccttcatcacacagtattccatgggacaggtcagcgtggagatagagtgggagctgcagaaggagaacagcaaacgctggaaccccgagatccagtatacttccaactacaacaaatctgttaatgtggactttactgtggacactaatggtgtgtattcagagcctcgccccattggcaccagatacctgactcgtaatctgtaa

SEQ ID NO: 3540 - DNA, 2208 bp, Artificial Sequence
  source: /note="Description of Artificial Sequence: Synthetic polynucleotide"
atggctgccgatggttatcttccagattggctcgaggacactctctctgaaggaataagacagtggtggaagctcaaacctggcccaccaccgccaaagcccgcagagcggcataaggacgacagcaggggtcttgtgcttcctgggtacaagtacctcggacccttcaacggactcgacaagggggagccggtcaacgaggcagacgccgcggccctcgagcacgacaaggtctacgaccggcagctcgacagcggagacaacccgtacctcaagtacaaccacgccgacgcggagtttcaggagcgtcttaaagaagatacgtcttttgggggcaacctcggacgagcagtcttccaggcgaaaaagagggttcttgaacctctgggcctggttgaggaacctgttaagacggctccgggaaaaaagaggccggtagagcactctcctgtggagccagactcctcctcgggaaccggaaaggcgggccagcagcctgcaagaaaaagattgaatttcggtcagactggagacgcagactccgtacctgacccccagcctctcggacagccaccagcagccccctctggtctgggaactaatacgatggctacaggcagtggcgcaccaatggcagacaataacgagggcgccgacggagtgggtaattcctcgggaaattggcattgcgattccacatggatgggcgacagagtcatcaccaccagcacccgcacctgggctctgcccacctacaacaaccatctgtacaagcaaatttccagccaatcaggagcatcgaacgacaaccactactttggctacagcaccccctgggggtattttgacttcaacagattccactgccacttttcgccacgtgactggcaaagactcatcaacaacaactggggattccggcccaagagactcagcttcaagctctttaacattcaagtcaaggaggtcacgcagaatgacggtacgacgacgattgccaataaccttaccagcacggttcaggtctttactgactcggagtaccagctcccgtacgtcctcggctcggcgcatcaaggatgcctcccgccgttcccagcagacgtcttcatggtgccacagtatggatacctcaccctgaacaacgggagtcaggcggtaggacgctcttcattttactgcctggagtacttcccttctcagatgcttcgcacgggaaacaactttaccttcagctacacctttgaggacgtgccttttcacagcagctacgctcacagccaaagtctggaccgtctcatgaatcctctcatcgaccaatacctgtattacttgagcaaaacaaacgctccaagcggaaccaccacgatgtccaggcttcagttttctcaggccggagcgagtgacattcgggaccagtctagaaactggcttcctggaccctgttaccgccagcagcgagtatcaaagacagctgcggacaacaacaacagtgattactcgtggactggagctaccaagtaccacctcaatggaagagactctctggtgaacccgggcccagctatggccagccacaaggatgatgaagaaaaatattttcctcagagcggggttctcatcttcgggaaacaaggctcaaataaaactaatgtggacattgaaaaggttatgattacagacgaagaggaaatcaggaccaccaatcccgtggctacggagcagtatggttctgtatctaccaaccttcaaagcggcaacacacaagcagctacctcagatgtcaacacacaaggcgttcttcctggcatggtctggcaggacagagatgtgtacctgcaggggcccatctgggcaaagattcctcacacggacggacactttcacccttctcccctcatgggcggatttggattgaagcaccctcccccacagattctcatcaagaataccccggtacctgcgaatccttcgaccaccttcagtgcggcaaagtttgcttccttcatcacacagtattccacgggacaggtcagcgtggagatagagtgggagctgcagaaggagaacagcaaacgctggaaccccgagatccagtatacttccaactacaacaaatctgttaatgtggactttactgtggacactaatggtgtgtattcagagcctcgccccattggcaccagatacctgactcgtaatctgtaa

SEQ ID NO: 3541 - DNA, 2208 bp, Artificial Sequence
  source: /note="Description of Artificial Sequence: Synthetic polynucleotide"
atggctgccgatggttatcttccagattggctcgaggacactctctctgaaggaataagacagtggtggaagctcaaacctggcccaccaccgccaaagcccgcagagcggcataaggacgacagcaggggtcttgtgcttcctgggtacaagtacctcggacccttcaacggactcgacaagggggagccggtcaacgaggcagacgccgcggccctcgagcacgacaaggcctacgaccggcagctcgacagcggagacaacccgtacctcaagtacaaccacgccgacgcggagtttcaggagcgtcttaaagaagatacgtcttttgggggcaacctcggacgagcagtcttccaggcgaaaaagagggttcttgaacctctgggcctggttgaggaacctgttaagacggctccgggaaaaaagaggccggtagagcactctcctgtggagccagactcctcctcgggaaccggaaaggcgggccagcagcctgcaagaaaaagattgaatttcggtcagactggagacgcagactccgtacctgacccccagcctctcggacagccaccagcagccccctctggtctgggaactaatacgatggctacaggcagtggcgcaccaatggcagacaataacgagggcgccgacggagtgggtaattcctcgggaaattggcattgcgattccacatggatgggcgacagagtcatcaccaccagcacccgcacctgggctctgcccacctacaacaaccatctgtacaagcaaatttccagccaatcaggagcatcgaacgacaaccactactttggctacagcaccccctgggggtattttgacttcaacagattccactgccacttttcgccacgtgactggcaaagactcatcaacaacaactggggattccggcccaagagactcagcttcaagctctttaacattcaagtcaaggaggtcacgcagaatgacggtacgacgacgattgccaataaccttaccagcacggttcaggtctttactgactcggagtaccagctcccgtacgtcctcggctcggcgcatcaaggatgcctcccgccgttcccagcagacgtcttcatggtgccacagtatggatacctcaccctgaacaacgggagtcaggcggtaggacgctcttcattttactgcctggagtacttcccttctcagatgcttcgcacgggaaacaactttaccttcagctacacctttgaggacgtgccttttcacagcagctacgctcacagccaaagtctggaccgtctcatgaatcctctcatcgaccaatacctgtattacttgagcaaaacaaacgctccaagcggaaccaccacgatgtccaggcttcagttttctcaggccggagcgagtgacattcgggaccagtctagaaactggcttcctggaccctgttaccgccagcagcgagtatcaaagacagctgcggacaacaacaacagtgattactcgtggactggagctaccaagtaccacctcaatggaagagactctctggtgaacccgggcccagctatggccagccacaaggatgatgaagaaaaatattttcctcagagcggggttctcatcttcgggaaacaaggctcaaataaaactaatgtggacattgaaaaggttatgattacagacgaagaggaaatcaggaccaccaatcccgtggctacggagcagtatggttctgtatctaccaaccttcaaagcggcaacacacaagcagctacctcagatgtcaacacacaaggcgttcttcctggcatggtctggcaggacagagatgtgtacctgcaggggcccatctgggcaaagattcctcacacggacggacactttcacccttctcccctcatgggcggatttggattgaagcaccctcccccacagattctcatcaagaataccccggtacctgcgaatccttcgaccaccttcagtgcggcaaagtttgcttccttcatcacacagtattccacgggacaggtcagcgtggagatagagtgggagctgcagaaggagaacaacaaacgctggaaccccgagatccagtatacttccaactacaacaaatctgttaatgtggactttactgtggacactaatggtgtgtattcagagcctcgccccattggcaccagatacctgactcgtaatctgtaa

SEQ ID NO: 3542 - DNA, 2208 bp, Artificial Sequence
  source: /note="Description of Artificial Sequence: Synthetic polynucleotide"
atggctgccgatggttatcttccagattggctcgaggacactctctctgaaggaataagacagtggtggaagctcaaacctggcccaccaccgccaaagcccgcagagcggcataaggacgacagcaggggtcttgtgcttcctgggtacaagtacctcggacccttcaacggactcgacaagggggagccggtcaacgaggcagacgccgcggccctcgagcacgacaaggcctacgaccggcagctcgacagcggagacaacccgtacctcaagtacaaccacgccgacgcggagtttcaggagcgtcttaaagaagatacgtcttttgggggcaacctcggacgagcagtcttccaggcgaaaaagagggttcttgaacctctgggcctggttgaggaacctgttaagacggctccgggaaaaaagaggccggtagagcactctcctgtggagccagactcctcctcgggaaccggaaaggcgggccagcagcctacaagaaaaagattgaatttcggtcagactggagacgcagactccgtacctgacccccagcctctcggacagccaccagcagccccctctggtctgggaactaatacgatggctacaggcagtggcgcaccaatggcagacaataacgagggcgccgacggagtgggtaattcctcgggaaattggcattgcgattccacatggatgggcgacagagtcatcaccaccagcacccgcacctgggctctgcccacctacaacaaccatctgtacaagcaaatttccagccaatcaggagcatcgaacgacaaccactactttggctacagcaccccctgggggtattttgacttcaacagattccactgccacttttcgccacgtgactggcaaagactcatcaacaacaactggggattccggcccaagagactcagcttcaagctctttaacattcaagtcaaggaggtcacgcagaatgacggtacgacgacgattgccaataaccttaccagcacggttcaggtctttactgactcggagtaccagctcccgtacgtcctcggctcggcgcatcaaggatgcctcccgccgttcccagcagacgtcttcatggtgccacagtatggatacctcaccctgaacaacgggagtcaggcggtaggacgctcttcattttactgcctggagtacttcccttctcagatgcttcgcacgggaaacaactttaccttcagctacacctttgaggacgtgccttttcacagcagctacgctcacagccaaagtctggaccgtctcatgaatcctctcatcgaccaatacctgtattacttgagcaaaacaaacgctccaagcggaaccaccacgatgtccaggcttcagttttctcaggccggagcgagtgacattcgggaccagtctagaaactggcttcctggaccctgttaccgccagcagcgagtatcaaagacagctgcggacaacaacaacagtgattactcgtggactggagctaccaagtaccacctcaatggaagagactctctggtgaacccgggcccagctatggccagccacaaggatgatgaagaaaaatattttcctcagagcggggttctcatcttcgggaaacaaggctcaaataaaactaatgtggacattgaaaaggttatgattacagacgaagaggaaatcaggaccaccaatcccgtggctacggagcagtatggttctgtatctaccaaccttcaaagcggcaacacacaagcagctacctcagatgtcaacacacaaggcgttcttcctggcatggtctggcaggacagagatgtgtacctgcaggggcccatctgggcaaagattcctcacacggacggacactttcacccttctcccctcatgggcggatttggattgaagcaccctcccccacagattctcatcaagaataccccggtacctgcgaatccttcgaccaccttcagtgcggcaaagtttgcttccttcatcacacagtattccacgggacaggtcagcgtggagatagagtgggagctgcagaaggagaacagcaaacgctggaaccccgagatccagtatacttccaactacaacaaatctgttaatgtggactttactgtggacactaatggtgtgtattcagagcctcgccccattggcaccagatacctgactcgtaatctgtaa

SEQ ID NO: 3543 - DNA, 2208 bp, Artificial Sequence
  source: /note="Description of Artificial Sequence: Synthetic polynucleotide"
atggctgccgatggttatcttccagattggctcgaggacactctctctgaaggaataagacagtggtggaagctcaaacctggcccaccaccgccaaagcccgcagagcggcataaggacgacagcaggggtcttgtgcttcctgggtacaagtacctcggacccttcaacggactcgacaagggggagccggtcaacgaggcagacgccgcggccctcgagcacgacaaggcctacgaccggcagctcgacagcggagacaacccgtacctcaagtacaaccacgccgacgcggagtttcaggagcgtcttaaagaagatacgtcttttgggggcaacctcggacgagcagtcttccaggcgaaaaagagggttcttgaacctctgggcctggttgaggaacctgttaagacggctccgggaaaaaagaggccggtagagcactctcctgtggagccagactcctcctcgggaaccggaaaggcgggccagcagcctgcaagaaaaagattgaatttcggtcagactggagacgcagactccgtacctgacccccagcctctcggacagccaccagcagccccctctggtctgggaactaatacgatggctacaggcagtggcgcaccaatggcagacaataacgagggcgccgacggagtgggtaattcctcgggaaattggcattgcgattccacatggatgggcgacagagtcatcaccaccagcacccgcacctgggctctgcccacctacaacaaccatctgtacaagcaaatttccagccaatcaggagcatcgaacgacaaccactactttggctacagcaccccctgggggtattttgacttcaacagattccactgccacttttcgccacgtgactggcaaagactcatcaacaacaactggggattccggcccaagagactcagcttcaagctctttaacattcaagtcaaggaggtcacgcagaatgacggtacgacgacgattgccaataaccttaccagcacggttcaggtctttactgactcggagtaccagctcccgtacgtcctcggctcggcgcatcaaggatgcctcccgccgttcccagcagacgtcttcatggtgccacagtatggatacctcaccctgaacaacgggagtcaggcggtaggacgctcttcattttactgcctggagtacttcccttctcagatgcttcgcacgggaaacaactttaccttcagctacacctttgaggacgtgccttttcacagcagctacgctcacagccaaagtctggaccgtctcatgaatcctctcatcgaccaatacctgtattacttgagcaaaacaaacgctccaagcggaaccaccacgatgtccaggcttcagttttctcaggccggagcgagtgacattcgggaccagtctagaaactggcttcctggaccctgttaccgccagcagcgagtatcaaagacagctgcggacaacaacaacagtgattactcgtggactggagctaccaagtaccacctcaatggaagagactctctggtgaacccgggcccagctatggccagccacaaggatgatgaagaaaaatattttcctcagagcggggttctcatcttcgggaaacaaggctcaaataaaactaatgtggacattgaaagggttatgattacagacgaagaggaaatcaggaccaccaatcccgtggctacggagcagtatggttctgtatctaccaaccttcaaagcggcaacacacaagcagctacctcagatgtcaacacacaaggcgttcttcctggcatggtctggcaggacagagatgtgtacctgcaggggcccatctgggcaaagattcctcacacggacggacactttcacccttctcccctcatgggcggatttggattgaagcaccctcccccacagattctcatcaagaataccccggtacctgcgaatccttcgaccaccttcagtgcggcaaagtttgcttccttcatcacacagtattccacgggacaggtcagcgtggagatagagtgggagctgcagaaggagaacagcaaacgctggaaccccgagatccagtatacttccaactacaacaaatctgttaatgtggactttactgtggacactaatggtgtgtattcagagcctcgccccattggcaccagatacctgactcgtaatctgtaa

SEQ ID NO: 3544 - DNA, 2208 bp, Artificial Sequence
  source: /note="Description of Artificial Sequence: Synthetic polynucleotide"
atggctgccgatggttatcttccagattggctcgaggacactctctctgaaggaataagacagtggtggaagctcaaacctggcccaccaccgccaaagcccgcagagcggcataaggacgacagcaggggtcttgtgcttcctgggtacaagtacctcggacccttcaacggactcgacaagggggagccggtcaacgaggcagacgccgcggccctcgagcacgacaaggcctacgaccggcagctcgacagcggagacaacccgtacctcaagtacaaccacgccgacgcggagtttcaggagcgtcttaaagaagatacgtcttttgggggcaacctcggacgagcagtcttccaggcgaaaaagagggttcttgaacctctgggcctggttgaggaacctgttaagacggctccgggaaaaaagaggccggtagagcactctcctgtggagccagactcctcctcgggaaccggaaaggcgggccagcagcctgtaagaaaaagattgaatttcggtcagactggagacgcagactccgtacctgacccccagcctctcggacagccaccagcagccccctctggtctgggaactaatacgatggctacaggcagtggcgcaccaatggcagacaataacgagggcgccgacggagtgggtaattcctcgggaaattggcattgcgattccacatggatgggcgacagagtcatcaccaccagcacccgcacctgggctctgcccacctacaacaaccatctgtacaagcaaatttccagccaatcaggagcatcgaacgacaaccactactttggctacagcaccccctgggggtattttgacttcaacagattccactgccacttttcgccacgtgactggcaaagactcatcaacaacaactggggattccggcccaagagactcagcttcaagctctttaacattcaagtcaaggaggtcacgcagaatgacggtacgacgacgattgccaataaccttaccagcacggttcaggtctttactgactcggagtaccagctcccgtacgtcctcggctcggcgcatcaaggatgcctcccgccgttcccagcagacgtcttcatggtgccacagtatggatacctcaccctgaacaacgggagtcaggcggtaggacgctcttcattttactgcctggagtacttcccttctcagatgcttcgcacgggaaacaactttaccttcagctacacctttgaggacgtgccttttcacagcagctacgctcacagccaaagtctggaccgtctcatgaatcctctcatcgaccaatacctgtattacttgagcaaaacaaacgctccaagcggaaccaccacgatgtccaggcttcagttttctcaggccggagcgagtgacattcgggaccagtctagaaactggcttcctggaccctgttaccgccagcagcgagtatcaaagacagctgcggacaacaacaacagtgattactcgtggactggagctaccaagtaccacctcaatggaagagactctctggtgaacccgggcccagctatggccagccacaaggatgatgaagaaaaatattttcctcagagcggggttctcatcttcgggaaacaaggctcaaataaaactaatgtggacattgaaaaggttatgattacagacgaagaggaaatcaggaccaccaatcccgtggctacggagcagtatggttctgtatctaccaaccttcaaagcggcaacacacaagcagctacctcagatgtcaacacacaaggcgttcttcctggcatggtctggcaggacagagatgtgtacctgcaggggcccatctgggcaaagattcctcacacggacggacactttcacccttctcccctcatgggcggatttggattgaagcaccctcccccacagattctcatcaagaataccccggtacctgcgaatccttcgaccaccttcagtgcggcaaagtttgcttccttcatcacacagtattccacgggacaggtcagcgtggagatagagtgggagctgcagaaggagaacagcaaacgctggaaccccgagatccagtatacttccaactacaacaaatctgttaatgtggactttactgtggacactaatggtgtgtattcagagcctcgccccattggcaccagatacctgactcgtaatctgtaa

SEQ ID NO: 3545 - DNA, 2208 bp, Artificial Sequence
  source: /note="Description of Artificial Sequence: Synthetic polynucleotide"
atggctgccgatggttatcttccagattggctcgaggacactctctctgaaggaataagacagtggtggaagctcaaacctggcccaccaccgccaaagcccgcagagcggcataaggacgacagcaggggtcttgtgcttcctgggtacaagtacctcggacccttcaacggactcgacaagggggagccggtcaacgaggcagacgccgcggccctcgagcacgacaaggcctacgaccggcagctcgacagcggagacaacccgtacctcaagtacaaccacgccgacgcggagtttcaggagcgtcttaaagaagatacgtcttttgggggcaacctcggacgagcagtcttccaggcgaaaaagagggttcttgaacctctgggcctggttgaggaacctgttaagacggctccgggaaaaaagaggccggtagagcactctcctgtggagccagactcctcctcgggaaccggaaaggcgggccagcagcctgcaagaaaaagattgaatttcggtcagactggagacgcagactccgtacctgacccccagcctctcggacagccaccagcagccccctctggtctgggaactaatacgatggctacaggcagtggcgcaccaatggcagacaataacgagggcgccgacggagtgggtaattcctcgggaaattggcattgcgattccacatggatgggcgacagagtcatcaccaccagcacccgcacctgggctctgcccacctacaacaaccatctgtacaagcaaatttccagccaatcaggagcatcgaacgacaaccactactttggctacagcaccccctgggggtattttgacttcaacagattccactgccacttttcgccacgtgactggcaaagactcatcaacaacaactggggattccggcccaagagactcagcttcaagctctttaacattcaagtcaaggaggtcacgcagaatgacggtacgacgacgattgccaataaccttaccagcacggttcaggtctttactgactcggagtaccagctcccgtacgtcctcggctcggcgcatcaaggatgcctcccgccgttcccagcagacgtcttcatggtgccacagtatggataccccaccctgaacaacgggagtcaggcggtaggacgctcttcattttactgcctggagtacttcccttctcagatgcttcgcacgggaaacaactttaccttcagctacacctttgaggacgtgccttttcacagcagctacgctcacagccaaagtctggaccgtctcatgaatcctctcatcgaccaatacctgtattacttgagcaaaacaaacgctccaagcggaaccaccacgatgtccaggcttcagttttctcaggccggagcgagtgacattcgggaccagtctagaaactggcttcctggaccctgttaccgccagcagcgagtatcaaagacagctgcggacaacaacaacagtgattactcgtggactggagctaccaagtaccacctcaatggaagagactctctggtgaacccgggcccagctatggccagccacaaggatgatgaagaaaaatattttcctcagagcggggttctcatcttcgggaaacaaggctcaaataaaactaatgtggacattgaaaaggttatgattacagacgaagaggaaatcaggaccaccaatcccgtggctacggagcagtatggttctgtatctaccaaccttcaaagcggcaacacacaagcagctacctcagatgtcaacacacaaggcgttcttcctggcatggtctggcaggacagagatgtgtacctgcaggggcccatctgggcaaagattcctcacacggacggacactttcacccttctcccctcatgggcggatttggattgaagcaccctcccccacagattctcatcaagaataccccggtacctgcgaatccttcgaccaccttcagtgcggcaaagtttgcttccttcatcacacagtattccacgggacaggtcagcgtggagatagagtgggagctgcagaaggagaacagcaaacgctggaaccccgagatccagtatacttccaactacaacaaatctgttaatgtggactttactgtggacactaatggtgtgtattcagagcctcgccccattggcaccagatacctgactcgtaatctgtaa

SEQ ID NO: 3546 - DNA, 2208 bp, Artificial Sequence
  source: /note="Description of Artificial Sequence: Synthetic polynucleotide"
atggctgccgatggttatcttccagattggctcgaggacactctctctgaaggaataagacagtggtggaagctcaaacctggcccaccaccgccaaagcccgcagagcggcataaggacgacagcaggggtcttgtgcttcctgggtacaagtacctcggacccttcaacggactcgacaagggggagccggtcaacgaggcagacgccgcggccctcgagcacgacaaggcctacgaccggcagctcgacagcggagacaacccgtacctcaagtacaaccacgccgacgcggagtttcaggagcgtcttaaagaagatacgtcttttgggggcaacctcggacgagcagtcttccaggcgaaaaagagggttcttgaacctctgggcctggttgaggaacctgttaagacggctccgggaaaaaagaggccggtagagcactctcctgtggagccagactcctcctcgggaaccggaaaggcgggccagcagcctgcaagaaaaagattgaatttcggtcagactggagacgcagactccgtacctgacccccagtctctcggacagccaccagcagccccctctggtctgggaactaatacgatggctacaggcagtggcgcaccaatggcagacaataacgagggcgccgacggagtgggtaattcctcgggaaattggcattgcgattccacatggatgggcgacagagtcatcaccaccagcacccgcacctgggctctgcccacctacaacaaccatctgtacaagcaaatttccagccaatcaggagcatcgaacgacaaccactactttggctacagcaccccctgggggtattttgacttcaacagattccactgccacttttcgccacgtgactggcaaagactcatcaacaacaactggggattccggcccaagagactcagcttcaagctctttaacattcaagtcaaggaggtcacgcagaatgacggtacgacgacgattgccaataaccttaccagcacggttcaggtctttactgactcggagtaccagctcccgtacgtcctcggctcggcgcatcaaggatgcctcccgccgttcccagcagacgtcttcatggtgccacagtatggatacctcaccctgaacaacgggagtcaggcggtaggacgctcttcattttactgcctggagtacttcccttctcagatgcttcgcacgggaaacaactttaccttcagctacacctttgaggacgtgccttttcacagcagctacgctcacagccaaagtctggaccgtctcatgaatcctctcatcgaccaatacctgtattacttgagcaaaacaaacgctccaagcggaaccaccacgatgtccaggcttcagttttctcaggccggagcgagtgacattcgggaccagtctagaaactggcttcctggaccctgttaccgccagcagcgagtatcaaagacagctgcggacaacaacaacagtgattactcgtggactggagctaccaagtaccacctcaatggaagagactctctggtgaacccgggcccagctatggccagccacaaggatgatgaagaaaaatattttcctcagagcggggttctcatcttcgggaaacaaggctcaaataaaactaatgtggacattgaaaaggttatgattacagacgaagaggaaatcaggaccaccaatcccgtggctacggagcagtatggttctgtatctaccaaccttcaaagcggcaacacacaagcagctacctcagatgtcaacacacaaggcgttcttcctggcatggtctggcaggacagagatgtgtacctgcaggggcccatctgggcaaagattcctcacacggacggacactttcacccttctcccctcatgggcggatttggattgaagcaccctcccccacagattctcatcaagaataccccggtacctgcgaatccttcgaccaccttcagtgcggcaaagtttgcttccttcatcacacagtattccacgggacaggtcagcgtggagatagagtgggagctgcagaaggagaacagcaaacgctggaaccccgagatccagtatacttccaactacaacaaatctgttaatgtggactttactgtggacactaatggtgtgtattcagagcctcgccccattggcaccagatacctgactcgtaatctgtaa

SEQ ID NO: 3547 - DNA, 2208 bp, Artificial Sequence
  source: /note="Description of Artificial Sequence: Synthetic polynucleotide"
atggctgccgatggttatcttccagattggctcgaggacactctctctgaaggaataagacagtggtggaagctcaaacctggcccaccaccgccaaagcccgcagagcggcataaggacgacagcaggggtcttgtgcttcctgggtacaagtacctcggacccttcaacggactcgacaagggggagccggtcaacgaggcagacgccgcggccctcgagcacgacaaggcctacgaccggcagctcgacagcggagacaacccgtacctcaagtacaaccacgccgacgcggagtttcaggagcgtcttaaagaagatacgtcttttgggggcaacctcggacgagcagtcttccaggcgaaaaagagggttcttgaacctctgggcctggttgaggaacctgttaagacggctccgggaaaaaagaggccggtagagcactctcctgtggagccagactcctcctcgggaaccggaaaggcgggccagcagcctgcaagaaaaagattgaatttcggtcagactggagacgcagactccgtacctgacccccagcctctcggacagccaccagcagccccctctggtctgggaactaatacgatggctacaggcagtggcgcaccaatggcagacaataacgagggcgccgacggagtgggtaattcctcgggaaattggcattgcgattccacatggatgggcgacagagtcatcaccaccagcacccgcacctgggctctgcccacctacaacaaccatctgtacaagcaaatttccagccaatcaggagcatcgaacgacaaccactactttggctacagcaccccctgggggtattttgacttcaacagattccactgccacttttcgccacgtgactggcaaagactcatcaacaacaactggggattccggcccaagagactcagcttcaagctctttaacattcaagtcaaggaggtcacgcagaatggcggtacgacgacgattgccaataaccttaccagcacggttcaggtctttactgactcggagtaccagctcccgtacgtcctcggctcggcgcatcaaggatgcctcccgccgttcccagcagacgtcttcatggtgccacagtatggatacctcaccctgaacaacgggagtcaggcggtaggacgctcttcattttactgcctggagtacttcccttctcagatgcttcgcacgggaaacaactttaccttcagctacacctttgaggacgtgccttttcacagcagctacgctcacagccaaagtctggaccgtctcatgaatcctctcatcgaccaatacctgtattacttgagcaaaacaaacgctccaagcggaaccaccacgatgtccaggcttcagttttctcaggccggagcgagtgacattcgggaccagtctagaaactggcttcctggaccctgttaccgccagcagcgagtatcaaagacagctgcggacaacaacaacagtgattactcgtggactggagctaccaagtaccacctcaatggaagagactctctggtgaacccgggcccagctatggccagccacaaggatgatgaagaaaaatattttcctcagagcggggttctcatcttcgggaaacaaggctcaaataaaactaatgtggacattgaaaaggttatgattacagacgaagaggaaatcaggaccaccaatcccgtggctacggagcagtatggttctgtatctaccaaccttcaaagcggcaacacacaagcagctacctcagatgtcaacacacaaggcgttcttcctggcatggtctggcaggacagagatgtgtacctgcaggggcccatctgggcaaagattcctcacacggacggacactttcacccttctcccctcatgggcggatttggattgaagcaccctcccccacagattctcatcaagaataccccggtacctgcgaatccttcgaccaccttcagtgcggcaaagtttgcttccttcatcacacagtattccacgggacaggtcagcgtggagatagagtgggagctgcagaaggagaacagcaaacgctggaaccccgagatccagtatacttccaactacaacaaatctgttaatgtggactttactgtggacactaatggtgtgtattcagagcctcgccccattggcaccagatacctgactcgtaatctgtaa

SEQ ID NO: 3548 - DNA, 2208 bp, Artificial Sequence
  source: /note="Description of Artificial Sequence: Synthetic polynucleotide"
atggctgccgatggttatcttccagattggctcgaggacactctctctgaaggaataagacagtggtggaagctcaaacctggcccaccaccgccaaagcccgcagagcggcataaggacgacagcaggggtcttgtgcttcctgggtacaagtacctcggacccttcaacggactcgacaagggggagccggtcaacgaggcagacgccgcggccctcgagcacgacaaggcctacgaccggcagctcgacagcggagacaacccgtacctcaagtacaaccacgccgacgcggagtttcaggagcgtcttaaagaagatacgtcttttgggggcaacctcggacgagcagtcttccaggcgaaaaagagggttcttgaacctctgggcctggttgaggaacctgttaagacggctccgggaaaaaagaggccggtagagcactctcctgtggagccagactcctcctcgggaaccggaaaggcgggccagcagcctgcaagaaaaagattgaatttcggtcagactggagacgcagactccgtacctgacccccagcctctcggacagccaccagcagccccctctggtctgggaactaatacgatggctacaggcagtggcgcaccaatggcagacaataacgagggcgccgacggagtgggtaattcctcgggaaattggcattgcgattccacatggatgggcgacagagtcatcaccaccagcacccgcacctgggctctgcccacctacaacaaccatctgtacaagcaaatttccagccaatcaggagcatcgaacgacaaccactactttggctacagcaccccctgggggtattttgacttcaacagattccactgccacttttcgccacgtgactggcaaagactcatcaacaacaactggggattccggcccaagagactcagcttcaagctctttaacattcaagtcaaggaggtcacgcagaatgacggtacgacgacgattgccaataaccttaccagcacggttcaggtctttactgactcggagtaccagctcccgtacgtcctcggctcggcgcatcaaggatgcctcccgccgttcccagcagacgtcttcatggtgccacagtatggatacctcaccctgaacaacgggagtcaggcggtaggacgctcttcattttactgcctggagtacttcccttctcagatgcttcgcacgggaaacaactttaccttcagctacacctttgaggacgtgccttttcacagcagctacgctcacagccaaagtctggaccgtctcatgaatcctctcatcgaccaatacctgtattacttgagcaaaacaaacgctccaagcggaaccaccacgatgtccgggcttcagttttctcaggccggagcgagtgacattcgggaccagtctagaaactggcttcctggaccctgttaccgccagcagcgagtatcaaagacagctgcggacaacaacaacagtgattactcgtggactggagctaccaagtaccacctcaatggaagagactctctggtgaacccgggcccagctatggccagccacaaggatgatgaagaaaaatattttcctcagagcggggttctcatcttcgggaaacaaggctcaaataaaactaatgtggacattgaaaaggttatgattacagacgaagaggaaatcaggaccaccaatcccgtggctacggagcagtatggttctgtatctaccaaccttcaaagcggcaacacacaagcagctacctcagatgtcaacacacaaggcgttcttcctggcatggtctggcaggacagagatgtgtacctgcaggggcccatctgggcaaagattcctcacacggacggacactttcacccttctcccctcatgggcggatttggattgaagcaccctcccccacagattctcatcaagaataccccggtacctgtgaatccttcgaccaccttcagtgcggcaaagtttgcttccttcatcacacagtattccacgggacaggtcagcgtggagatagagtgggagctgcagaaggagaacagcaaacgctggaaccccgagatccagtatacttccaactacaacaaatctgttaatgtggactttactgtggacactaatggtgtgtattcagagcctcgccccattggcaccagatacctgactcgtaatctgtaa

SEQ ID NO: 3549 - DNA, 2208 bp, Artificial Sequence
  source: /note="Description of Artificial Sequence: Synthetic polynucleotide"
atggctgccgatggttatcttccagattggctcgaggacactctctctgaaggaataagacagtggtggaagctcaaacctggcccaccaccgccaaagcccgcagagcggcataaggacgacagcaggggtcttgtgcttcctgggtacaagtacctcggacccttcaacggactcgacaagggggagccggtcaacgaggcagacgccgcggccctcgagcacgacaaggcctacgaccggcagctcgacagcggagacaacccgtacctcaagtacaaccacgccgacgcggagtttcaggagcgtcttaaagaagatacgtcttttgggggcaacctcggacgagcagtcttccaggcgaaaaagagggttcttgaacctctgggcctggttgaggaacctgttaagacggctccgggaaaaaagaggccggtagagcactctcctgtggagccagactcctcctcgggaaccggaaaggcgggccagcagcctgcaagaaaaagattgaatttcggtcagactggagacgcagactccgtacctgacccccagcctctcggacagccaccagcagccccctctggtctgggaactaatacgatggctacaggcagtggcgcaccaatggcagacaataacgagggcgccgacggagtgggtaattcctcgggaaattggcattgcgattccacatggatgggcgacagagtcatcaccaccagcacccgcacctgggctctgcccacctacaacaaccatctgtacaagcaaatttccagccaatcaggagcatcgaacgacaaccactactttggctacagcaccccctgggggtattttgacttcaacagattccactgccacttttcgccacgtgactggcaaagactcatcaacaacaactggggattccggcccaagagactcagcttcaagctctttaacattcaagtcaaggaggtcacgcagaatgacggtacgacgacgattgccaataaccttaccagcacggttcaggtctttactgactcggagtaccagctcccgtacgtcctcggctcggcgcatcaaggatgcctcccgccgttcccagcagacgtcttcatggtgccacagtatggatacctcaccctgaacaacgggagtcaggcggtaggacgctcttcattttactgcctggagtacttcccttctcagatgcttcgcacgggaaacaactttaccttcagctacacctttgaggacgtgccttttcacagcagctacgctcacagccaaagtctggaccgtctcatgaatcctctcatcgaccaatacctgtattacttgagcaaaacaaacgctccaagcggaaccaccacgatgtccaggcttcagttttctcaggccggagcgagtgacattcgggaccagtctagaaactggcttcctggaccctgttaccgccagcagcgagtatcaaagacagctgcggacaacaacaacagtgattactcgtggactggagctaccaagtaccacctcaatggaagagactctctggtgaacccgggcccaactatggccagccacaaggatgatgaagaaaaatattttcctcagagcggggttctcatcttcgggaaacaaggctcaaataaaactaatgtggacattgaaaaggttatgattacagacgaagaggaaatcaggaccaccaatcccgtggctacggagcagtatggttctgtatctaccaaccttcaaagcggcaacacacaagcagctacctcagatgtcaacacacaaggcgttcttcctggcatggtctggcaggacagagatgtgtacctgcaggggcccatctgggcaaagattcctcacacggacggacactttcacccttctcccctcatgggcggatttggattgaagcaccctcccccacagattctcatcaagaataccccggtacctgcgaatccttcgaccaccttcagtgcggcaaagtttgcttccttcatcacacagtattccacgggacaggtcagcgtggagatagagtgggagctgcagaaggagaacagcaaacgctggaaccccgagatccagtatacttccaactacaacaaatctgttaatgtggactttactgtggacactaatggtgtgtattcagagcctcgccccattggcaccagatacctgactcgtaatctgtaa

SEQ ID NO: 3550 - DNA, 2208 bp, Artificial Sequence
  source: /note="Description of Artificial Sequence: Synthetic polynucleotide"
atggctgccgatggttatcttccagattggctcgaggacactctctctgaaggaataagacagtggtggaagctcaaacctggcccaccaccgccaaagcccgcagagcggcataaggacgacagcaggggtcttgtgcttcctgggtacaagtacctcggacccctcaacggactcgacaagggggagccggtcaacgaggcagacgccgcggccctcgagcacgacaaggcctacgaccggcagctcgacagcggagacaacccgtacctcaagtacaaccacgccgacgcggagtttcaggagcgtcttaaagaagatacgtcttttgggggcaacctcggacgagcagtcttccaggcgaaaaagagggttcttgaacctctgggcctggttgaggaacctgttaagacggctccgggaaaaaagaggccggtagagcactctcctgtggagccagactcctcctcgggaaccggaaaggcgggccagcagcctgcaagaaaaagattgaatttcggtcagactggagacgcagactccgtacctgacccccagcctctcggacagccaccagcagccccctctggtctgggaactaatacgatggctacaggcagtggcgcaccaatggcagacaataacgagggcgccgacggagtgggtaattcctcgggaaattggcattgcgattccacatggatgggcgacagagtcatcaccaccagcacccgcacctgggctctgcccacctacaacaaccatctgtacaagcaaatttccagccaatcaggagcatcgaacgacaaccactactttggctacagcaccccctgggggtattttgacttcaacagattccactgccacttttcgccacgtgactggcaaagactcatcaacaacaactggggattccggcccaagagactcagcttcaagctctttaacattcaagtcaaggaggtcacgcagaatgacggtacgacgacgattgccaataaccttaccagcacggttcaggtctttactgactcggagtaccagctcccgtacgtcctcggctcggcgcatcaaggatgcctcccgccgttcccagcagacgtcttcatggtgccacagtatggatacctcaccctgaacaacgggagtcaggcggtaggacgctcttcattttactgcctggagtacttcccttctcagatgcttcgcacgggaaacaactttaccttcagctacacctttgaggacgtgccttttcacagcagctacgctcacagccaaagtctggaccgtctcatgaatcctctcatcgaccaatacctgtattacttgagcaaaacaaacgctccaagcggaaccaccacgatgtccaggcttcagttttctcaggccggagcgagtgacattcgggaccagtctagaaactggcttcctggaccctgttaccgccagcagcgagtatcaaagacagctgcggacaacaacaacagtgattactcgtggactggagctaccaagtaccacctcaatggaagagactctctggtgaacccgggcccagctatggccagccacaaggatgatgaagaaaaatattttcctcagagcggggttctcatcttcgggaaacaaggctcaaataaaactaatgtggacattgaaaaggttatgattacagacgaagaggaaatcaggaccaccaatcccgtggctacggagcagtatggttctgtatctaccaaccttcaaagcggcaacacacaagcagctacctcagatgtcaacacacaaggcgttcttcctggcatggtctggcaggacagagatgtgtacctgcaggggcccatctgggcaaagattcctcacacggacggacactttcacccttctcccctcatgggcggatttggattgaagcaccctcccccacagattctcatcaagaataccccggtacctgcgaatccttcgaccaccttcagtgcggcaaagtttgcttccttcatcacacagtattccacgggacaggtcagcgtggagatagagtgggagctgcagaaggagaacagcaaacgctggaaccccgagatccagtatacttccaactacaacaaatctgttaatgtggactttactgtggacactaatggtgtgtattcagagcctcgccccattggcaccagatacctgactcgtaatctgtaa

SEQ ID NO: 3551 - DNA, 2208 bp, Artificial Sequence
  source: /note="Description of Artificial Sequence: Synthetic polynucleotide"
atggctgccgatggttatcttccagattggctcgaggacactctctctgaaggaataagacagtggtggaagctcaaacctggcccaccaccgccaaagcccgcagagcggcataaggacgacagcaggggtcttgtgcttcctgggtacaagtacctcggacccttcaacggactcgacaagggggagccggtcaacgaggcagacgccgcggccctcgagcacgacaaggcctacgaccggcagctcgacagcggagacaacccgtacctcaagtacaaccacgccgacgcggagtttcaggagcgtcttaaagaagatacgtcttttgggggcaacctcggacgagcagtcttccaggcgaaaaagagggttcttgaacctctgggcctggttgaggaacctgttaagacggctccgggaaaaaagaggccggtagagcactctcctgtggagccagactcctcctcgggaaccggaaaggcgggccagcagcctgcaagaaaaagattgaatttcggtcagactggagacgcagactccgtacctgacccccagcctctcggacagccaccagcagccccctctggtctgggaactaatacgatggctacaggcagtggcgcaccaatggcagacaataacgagggcgccgacggagtgggtaattcctcgggaaattggcattgcgattccacatggatgggcgacagagtcatcaccaccagcacccgcacctgggctctgcccacctacaacaaccatctgtacaagcaaatttccagccaatcaggagcatcgaacgacaaccactactttggctacagcaccccctgggggtattttgacttcaacagattccactgccacttttcgccacgtgactggcaaagactcatcaacaacaactggggattccggcccaagagactcagcttcaagctctttaacattcaagtcaaggaggtcacgcagaatgacggtacgacgacgattgccaataaccttaccagcacggttcaggtctttactgactcggagtaccagctcccgtacgtcctcggctcggcgcatcaaggatgcctcccgccgttcccagcagacgtcttcatggtgccacagtatggatacctcaccctgaacaacgggagtcaggcggtaggacgctcttcattttactgcctggagtacttcccttctcagatgcttcgcacgggaaacaactttaccttcagctacacctttgaggacgtgccttttcacagcagctacgctcacagccaaagtctggaccgtctcatgaatcctctcatcgaccaatacctgtattacttgagcaaaacaaacgctccaagcggaaccaccacgatgtccaggcttcagttttctcaggccggagcgagtgacattcgggaccagtctagaaactggcttcctggaccctgttaccgccagcagcgagtatcaaagacagctgcggacaacaacaacagtgattactcgtggactggagctaccaagtaccacctcaatggaagagactctctggtgaacccgggcccagctatgaccagccacaaggatgatgaagaaaaatattttcctcagagcggggttctcatcttcgggaaacaaggctcaaataaaactaatgtggacattgaaaaggttatgattacagacgaagaggaaatcaggaccaccaatcccgtggctacggagcagtatggttctgtatctaccaaccttcaaagcggcaacacacaagcagctacctcagatgtcaacacacaaggcgttcttcctggcatggtctggcaggacagagatgtgtacctgcaggggcccatctgggcaaagattcctcacacggacggacactttcacccttctcccctcatgggcggatttggattgaagcaccctcccccacagattctcatcaagaataccccggtacctgcgaatccttcgaccaccttcagtgcggcaaagtttgcttccttcatcacacagtattccacgggacaggtcagcgtggagatagagtgggagctgcagaaggagaacagcaaacgctggaaccccgagatccagtatacttccaactacaacaaatctgttaatgtggactttactgtggacactaatggtgtgtattcagagcctcgccccattggcaccagatacctgactcgtaatctgtaa

SEQ ID NO: 3552 - DNA, 2208 bp, Artificial Sequence
  source: /note="Description of Artificial Sequence: Synthetic polynucleotide"
atggctgccgatggttatcttccagattggctcgaggacactctctctgaaggaataagacagtggtggaagctcaaacctggcccaccaccgccaaagcccgcagagcggcataaggacgacagcaggggtcttgtgcttcctgggtacaagtacctcggacccttcaacggactcgacaagggggagccggtcaacgaggcagacgccgcggccctcgagcacgacaaggcctacgaccggcagctcgacagcggagacaacccgtacctcaagtacaaccacgccgacgcggagtttcaggagcgtcttaaagaagatacgtcttttgggggcaacctcggacgagcagtcttccaggcgaaaaagagggttcttgaacctctgggcctggttgaggaacctgttaagacggctccgggaaaaaagaggccggtagagcactctcctgtggagccagactcctcctcgggaaccggaaaggcgggccagcagcctgcaagaaaaagattgaatttcggtcagactggagacgcagactccgtacctgacccccagcctctcggacagccaccagcagccccctctggtctgggaactaatacgatggctacaggcagtggcgcaccaatggcagacaataacgagggcgccgacggagtgggtaattcctcgggaaattggcattgcgattccacatggatgggcgacagagtcatcaccaccagcacccgcacctgggctctgcccacctacaacaaccatctgtacaagcaaatttccagccaatcaggagcatcgaacgacaaccactactttggctacagcaccccctgggggtattttgacttcaacagattccactgccacttttcgccacgtgactggcaaagactcatcaacaacaactggggattccggcccaagagactcagcttcaagctctttaacattcaagtcaaggaggtcacgcagaatgacggtacgacgacgattgccaataaccttaccagcacggttcaggtctttactgactcggagtaccagctcccgtacgtcctcggctcggcgcatcaaggatgcctcccgccgttcccagcagacgtcttcatggtgccacagtatggatacctcaccctgaacaacgggagtcaggcggtaggacgctcttcattttactgcctggagtacttcccttctcagatgcttcgcacgggaaacaactttaccttcagctacacctttgaggacgtgccttttcacagcagctacgctcacagccaaagtctggaccgtctcatgaatcctctcatcgaccaatacctgtattacttgagcaaaacaaacgctccaagcggaaccaccacgatgtccaggcttcagttttctcaggccggagcgagtgacattcgggaccagtctagaaactggcttcctggaccctgttaccgccagcagcgagtatcaaagacagctgcggacaacaacaacagtgattactcgtggactggagctaccaagtaccacctcaatggaagagactctctggtgaacccgggcccagctatggccagccacaaggatgatgaagaaaaatattttcctcagagcggggttctcatcttcgggaaacaaggctcaaataaaactaatgtggacattgaaaaggttatgattacagacgaagaggaaatcaggaccaccaatcccgtggctacggagcagtatggttctgtatctaccaaccttcaaagcggcaacacacaagcagctacctcagatgtcaacacacaaggcgttcttcctggcatggtctggcaggacagagatgtgtacctgcaggggcccatctggacaaagattcctcacacggacggacactttcacccttctcccctcatgggcggatttggattgaagcaccctcccccacagattctcatcaagaataccccggtacctgcgaatccttcgaccaccttcagtgcggcaaagtttgcttccttcatcacacagtattccacgggacaggtcagcgtggagatagagtgggagctgcagaaggagaacagcaaacgctggaaccccgagatccagtatacttccaactacaacaaatctgttaatgtggactttactgtggacactaatggtgtgtattcagagcctcgccccattggcaccagatacctgactcgtaatctgtaa

SEQ ID NO: 3553 - DNA, 2208 bp, Artificial Sequence
  source: /note="Description of Artificial Sequence: Synthetic polynucleotide"
atggctgccgatggttatcttccagattggctcgaggacactctctctgaaggaataagacagtggtggaagctcaaacctggcccaccaccgccaaagcccgcagagcggcataaggacgacagcaggggtcttgtgcttcctgggtacaagtacctcggacccttcaacggactcgacaagggggagccggtcaacgaggcagacgccgcggccctcgagcacgacaaggcctacgaccggcagctcgacagcggagacaacccgtacctcaagtacaaccacgccgacgcggagtttcaggagcgtcttaaagaagatacgtcttttgggggcaacctcggacgagcagtcttccaggcgaaaaagagggttcttgaacctctgggcctggttgaggaacctgttaagacggctccgggaaaaaagaggccggtagagcactctcctgtggagccagactcctcctcgggaaccggaaaggcgggccagcagcctgcaagaaaaagattgaatttcggtcagactggagacgcagactccgtacctgacccccagcctctcggacagccaccagtagccccctctggtctgggaactaatacgatggctacaggcagtggcgcaccaatggcagacaataacgagggcgccgacggagtgggtaattcctcgggaaattggcattgcgattccacatggatgggcgacagagtcatcaccaccagcacccgcacctgggctctgcccacctacaacaaccatctgtacaagcaaatttccagccaatcaggagcatcgaacgacaaccactactttggctacagcaccccctgggggtattttgacttcaacagattccactgccacttttcgccacgtgactggcaaagactcatcaacaacaactggggattccggcccaagagactcagcttcaagctctttaacattcaagtcaaggaggtcacgcagaatgacggtacgacgacgattgccaataaccttaccagcacggttcaggtctttactgactcggagtaccagctcccgtacgtcctcggctcggcgcatcaaggatgcctcccgccgttcccagcagacgtcttcatggtgccacagtatggatacctcaccctgaacaacgggagtcaggcggtaggacgctcttcattttactgcctggagtacttcccttctcagatgcttcgcacgggaaacaactttaccttcagctacacctttgaggacgtgccttttcacagcagctacgctcacagccaaagtctggaccgtctcatgaatcctctcatcgaccaatacctgtattacttgagcaaaacaaacgctccaagcggaaccaccacgatgtccaggcttcagttttctcaggccggagcgagtgacattcgggaccagtctagaaactggcttcctggaccctgttaccgccagcagcgagtatcaaagacagctgcggacaacaacaacagtgattactcgtggactggagctaccaagtaccacctcaatggaagagactctctggtgaacccgggcccagctatggccagccacaaggatgatgaagaaaaatattttcctcagagcggggttctcatcttcgggaaacaaggctcaaataaaactaatgtggacattgaaaaggttatgattacagacgaagaggaaatcaggaccaccaatcccgtggctacggagcagtatggttctgtatctaccaaccttcaaagcggcaacacacaagcagctacctcagatgtcaacacacaaggcgttcttcctggcatggtctggcaggacagagatgtgtacctgcaggggcccatctgggcaaagattcctcacacggacggacactttcacccttctcccctcatgggcggatttggattgaagcaccctcccccacagattctcatcaagaataccccggtacctgcgaatccttcgaccaccttcagtgcggcaaagtttgcttccttcatcacacagtattccacgggacaggtcagcgtggagatagagtgggagctgcagaaggagaacagcaaacgctggaaccccgagatccagtatacttccaactacaacaaatctgttaatgtggactttactgtggacactaatggtgtgtattcagagcctcgccccattggcaccagatacctgactcgtaatctgtaa

SEQ ID NO: 3554 - DNA, 2208 bp, Artificial Sequence
  source: /note="Description of Artificial Sequence: Synthetic polynucleotide"
atggctgccgatggttatcttccagattggctcgaggacactctctctgaaggaataagacagtggtggaagctcaaacctggcccaccaccgccaaagcccgcagagcggcataaggacgacagcaggggtcttgtgcttcctgggtacaagtacctcggacccttcaacggactcgacaagggggagccggtcaacgaggcagacgccgcggccctcgagcacgacaaggcctacgaccggcagctcgacagcggagacaacccgtacctcaagtacaaccacgccgacgcggagtttcaggagcgtcttaaagaagatacgtcttttgggggcaacctcggacgagcagtcttccaggcgaaaaagagggttcttgaacctctgggcctggttgaggaacctgttaagacggctccgggaaaaaagaggccggtagagcactctcctgtggagccagactcctcctcgggaaccggaaaggcgggccagcagcctgcaagaaaaagattgaatttcggtcagactggagacgcagactccgtacctgacccccagcctctcggacagccaccagcagccccctctggtctgggaactaatacgatggctacaggcagtggcgcaccaatggcagacaataacgagggcgccgacggagtgggtaattcctcgggaaattggcattgcgattccacatggatgggcgacagagtcatcaccaccagcacccgcacctgggctctgcccacctacaacaaccatctgtacaagcaaatttccagccaatcaggagcatcgaacgacaaccactactttggctacagcaccccctgggggtattttgacttcaacagattccactgccacttttcgccacgtgactggcaaagactcatcaacaacaactggggattccggcccaagagactcagcttcaagctctttaacattcaagtcaaggaggtcacgcagaatgacggtacgacgacgattgccaataaccttaccagcacggttcaggtctttactgactcggagtaccagctcccgtacgtcctcggctcggcgcatcaaggatgcctcccgccgttcccagcagacgtcttcatggtgccacagtatggatacctcaccctgaacaacgggagtcaggcggtaggacgctcttcattttactgcctggagtacttcccttctcagatgcttcgcacgggaaacaactttaccttcagctacacctttgaggacgtgccttttcacagcagctacgctcacagccaaagtctggaccgtctcatgaatcctctcatcgaccaatacctgtattacttgagcaaaacaaacgctccaagcggaaccaccacgatgtccaggcttcagttttctcaggccggagcgagtgacattcgggaccagtctagaaactggcttcctggaccctgttaccgccagcagcgagtatcaaagacagctgcggacaacaacaacagtgattactcgtggactggagctaccaagtaccacctcaatggaagagactctctggtgaacccgggcccagctatggccagccacaaggatgatgaagaaaaatattttcctcagagcggggttctcatcttcgggaaacaaggctcaaataaaactaatgtggacattgaaaaggttatgattacagacgaagaggaaatcaggaccaccaatcccgtggctacggagcagtatggttctgtatctaccaaccttcaaagcggcaacacacaagcagctacctcagatgtcaacacacaaggcgttcttcctggcatggtctggcaggacagagatgtgtacctgcaggggcccatctgggcaaagattcctcacacggacggacactttcacccttctcccctcatgggcggatttggattgaagcaccctcccccacagattctcatcaagaataccccggtacctgcgaatccttcgaccaccttcagtgcggcaaagtttgcttccttcatcacacagtattccacgggacaggtcagcgtggagatagagtgggagccgcagaaggagaacagcaaacgctggaaccccgagatccagtatacttccaactacaacaaatctgttaatgtggactttactgtggacactaatggtgtgtattcagagcctcgccccattggcaccagatacctgactcgtaatctgtaa

SEQ ID NO: 3555 - DNA, 2208 bp, Artificial Sequence
  source: /note="Description of Artificial Sequence: Synthetic polynucleotide"
atggctgccgatggttatcttccagattggctcgaggacactctctctgaaggaataagacagtggtggaagctcaaacctggcccaccaccgccaaagcccgcagagcggcataaggacgacagcaggggtcttgtgcttcctgggtacaagtacctcggacccttcaacggactcgacaagggggagccggtcaacgaggcagacgccgcggccctcgagcacgacaaggcctacgaccggcagctcgacagcggagacaacccgtacctcaagtacaaccacgccgacgcggagtttcaggagcgtcttaaagaagatacgtcttttgggggcaacctcggacgagcagtcttccaggcgaaaaagagggttcttgaacctctgggcctggttgaggaacctgttaagacggctccgggaaaaaagaggccggtagagcactctcctgtggagccagactcctcctcgggaaccggaaaggcgggccagcagcctgcaagaaaaagattgaatttcggtcagactggagacgcagactccgtacctgacccccagcctctcggacagccaccagcagccccctctggtctgggaactaatacgatggctacaggcagtggcgcaccaatggcagacaataacgagggcgccgacggagtgggtaattcctcgggaaattggcattgcgattccacatggatgggcgacagagtcatcaccaccagcacccgcacctgggctctgcccacctacaacaaccatctgtacaagcaaatttccagccaatcaggagcatcgaacgacaaccactactttggctacagcaccccctgggggtattttgacttcaacagattccactgccacttttcgccacgtgactggcaaagactcatcaacaacaactggggattccggcccaagagactcagcttcaagctctttaacattcaagtcaaggaggtcacgcagaatgacggtacgacgacgattgccaataaccttaccagcacggttcaggtctttactgactcggagtaccagctcccgtacgtcctcggctcggcgcatcaaggatgcctcccgccgttcccagcagacgtcttcatggtgccacagtatggatacctcaccctgaacaacgggagtcaggcggtaggacgctcttcattttactgcctggagtacttcccttctcagatgcttcgcacgggaaacaactttaccttcagctacacctttgaggacgtgccttttcacagcagctacgctcacagccaaagtctggaccgtctcatgaatcctctcatcgaccaatacctgtattacttgagcaaaacaaacgctccaagcggaaccaccacgatgtccaggcttcagttttctcaggccggagcgagtgacattcgggaccagtctagaaactggcttcctggaccctgttaccgccagcagcgagtatcaaagacagttgcggacaacaacaacagtgattactcgtggactggagctaccaagtaccacctcaatggaagagactctctggtgaacccgggcccagctatggccagccacaaggatgatgaagaaaaatattttcctcagagcggggttctcatcttcgggaaacaaggctcaaataaaactaatgtggacattgaaaaggttatgattacagacgaagaggaaatcaggaccaccaatcccgtggctacggagcagtatggttctgtatctaccaaccttcaaagcggcaacacacaagcagctacctcagatgtcaacacacaaggcgttcttcctggcatggtctggcaggacagagatgtgtacctgcaggggcccatctgggcaaagattcctcacacggacggacactttcacccttctcccctcatgggcggatttggattgaagcaccctcccccacagattctcatcaagaataccccggtacctgcgaatccttcgaccaccttcagtgcggcaaagtttgcttccttcatcacacagtattccacgggacaggtcagcgtggagatagagtgggagctgcagaaggagaacagcaaacgctggaaccccgagatccagtatacttccaactacaacaaatctgttaatgtggactttactgtggacactaatggtgtgtattcagagcctcgccccattggcaccagatacctgactcgtaatctgtaa

SEQ ID NO: 3556 - DNA, 2208 bp, Artificial Sequence
  source: /note="Description of Artificial Sequence: Synthetic polynucleotide"
atggctgccgatggttatcttccagattggctcgaggacactctctctgaaggaataagacagtggtggaagctcaaacctggcccaccaccgccaaagcccgcagagcggcataaggacgacagcaggggtcttgtgcttcctgggtacaagtacctcggacccttcaacggactcgacaagggggagccggtcaacgaggcagacgccgcggccctcgagcacgacaaggcctacgaccggcagctcgacagcggagacaacccgtacctcaagtacaaccacgccgacgcggagtttcaggagcgtcttaaagaagatacgtcttttgggggcaacctcggacgagcagtcttccaggcgaaaaagagggttcttgaacctctgggcctggttgaggaacctgttaagacggctccgggaaaaaagaggccggtagagcactctcctgtggagccagactcctcctcgggaaccggaaaggcgggccagcagcctgcaagaaaaagattgaatttcggtcagactggagacgcagactccgtacctgacccccagcctctcggacagccaccagcagccccctctggtctgggaactaatacgatggctacaggcagtggcgcaccaatggcagacaataacgagggcgccgacggagtgggtaattcctcgggaaattggcattgcgattccacatggatgggcgacagagtcatcaccaccagcacccgcacctgggctctgcccacctacaacaaccatctgtacaagcaaatttccagccaatcaggagcatcgaacgacaaccactactttggctacagcaccccctgggggtattttgacttcaacagattccactgccacttttcgccacgtgactggcaaagactcatcaacaacaactggggattccggcccaagagactcagcttcaagctctttaacattcaagtcaaggaggtcacgcagaatgacggtacgacgacgattgccaataaccttaccagcacggttcaggtctttactgactcggagtaccagctcccgtacgtcctcggctcggcgcatcaaggatgcctcccgccgttcccagcagacgtcttcatggtgccacagtatggatacctcaccctgaacaacgggagtcaggcggtaggacgctcttcattttactgcctggagtacttcccttctcagatgcttcgcacgggaaacaactttaccttcagctacacctttgaggacgtgccttttcacagcagctacgctcacagccaaagtctggaccgtctcatgaatcctctcatcgaccaatacccgtattacttgagcaaaacaaacgctccaagcggaaccaccacgatgtccaggcttcagttttctcaggccggagcgagtgacattcgggaccagtctagaaactggcttcctggaccctgttaccgccagcagcgagtatcaaagacagctgcggacaacaacaacagtgattactcgtggactggagctaccaagtaccacctcaatggaagagactctctggtgaacccgggcccagctatggccagccacaaggatgatgaagaaaaatattttcctcagagcggggttctcatcttcgggaaacaaggctcaaataaaactaatgtggacattgaaaaggttatgattacagacgaagaggaaatcaggaccaccaatcccgtggctacggagcagtatggttctgtatctaccaaccttcaaagcggcaacacacaagcagctacctcagatgtcaacacacaaggcgttcttcctggcatggtctggcaggacagagatgtgtacctgcaggggcccatctgggcaaagattcctcacacggacggacactttcacccttctcccctcatgggcggatttggattgaagcaccctcccccacagattctcatcaagaataccccggtacctgcgaatccttcgaccaccttcagtgcggcaaagtttgcttccttcatcacacagtattccacgggacaggtcagcgtggagatagagtgggagctgcagaaggagaacagcaaacgctggaaccccgagatccagtatacttccaactacaacaaatctgttaatgtggactttactgtggacactaatggtgtgtattcagagcctcgccccattggcaccagatacctgactcgtaatctgtaa

SEQ ID NO: 3557 - DNA, 2208 bp, Artificial Sequence
  source: /note="Description of Artificial Sequence: Synthetic polynucleotide"
atggctgccgatggttatcttccagattggctcgaggacactctctctgaaggaataagacagtggtggaagctcaaacctggcccaccaccgccaaagcccgcagagcggcataaggacgacagcaggggtcttgtgcttcctgggtacaagtacctcggacccttcaacggactcgacaagggggagccggtcaacgaggcagacgccgcggccctcgagcacgacaaggcctacgaccggcagctcgacagcggagacaacccgtacctcaagtacaaccacaccgacgcggagtttcaggagcgtcttaaagaagatacgtcttttgggggcaacctcggacgagcagtcttccaggcgaaaaagagggttcttgaacctctgggcctggttgaggaacctgttaagacggctccgggaaaaaagaggccggtagagcactctcctgtggagccagactcctcctcgggaaccggaaaggcgggccagcagcctgcaagaaaaagattgaatttcggtcagactggagacgcagactccgtacctgacccccagcctctcggacagccaccagcagccccctctggtctgggaactaatacgatggctacaggcagtggcgcaccaatggcagacaataacgagggcgccgacggagtgggtaattcctcgggaaattggcattgcgattccacatggatgggcgacagagtcatcaccaccagcacccgcacctgggctctgcccacctacaacaaccatctgtacaagcaaatttccagccaatcaggagcatcgaacgacaaccactactttggctacagcaccccctgggggtattttgacttcaacagattccactgccacttttcgccacgtgactggcaaagactcatcaacaacaactggggattccggcccaagagactcagcttcaagctctttaacattcaagtcaaggaggtcacgcagaatgacggtacgacgacgattgccaataaccttaccagcacggttcaggtctttactgactcggagtaccagctcccgtacgtcctcggctcggcgcatcaaggatgcctcccgccgttcccagcagacgtcttcatggtgccacagtatggatacctcaccctgaacaacgggagtcaggcggtaggacgctcttcattttactgcctggagtacttcccttctcagatgcttcgcacgggaaacaactttaccttcagctacacctttgaggacgtgccttttcacagcagctacgctcacagccaaagtctggaccgtctcatgaatcctctcatcgaccaatacctgtattacttgagcaaaacaaacgctccaagcggaaccaccacgatgtccaggcttcagttttctcaggccggagcgagtgacattcgggaccagtctagaaactggcttcctggaccctgttaccgccagcagcgagtatcaaagacagctgcggacaacaacaacagtgattactcgtggactggagctaccaagtaccacctcaatggaagagactctctggtgaacccgggcccagctatggccagccacaaggatgatgaagaaaaatattttcctcagagcggggttctcatcttcgggaaacaaggctcaaataaaactaatgtggacattgaaaaggttatgattacagacgaagaggaaatcaggaccaccaatcccgtggctacggagcagtatggttctgtatctaccaaccttcaaagcggcaacacacaagcagctacctcagatgtcaacacacaaggcgttcttcctggcatggtctggcaggacagagatgtgtacctgcaggggcccatctgggcaaagattcctcacacggacggacactttcacccttctcccctcatgggcggatttggattgaagcaccctcccccacagattctcatcaagaataccccggtacctgcgaatccttcgaccaccttcagtgcggcaaagtttgcttccttcatcacacagtattccacgggacaggtcagcgtggagatagagtgggagctgcagaaggagaacagcaaacgctggaaccccgagatccagtatacttccaactacaacaaatctgttaatgtggactttactgtggacactaatggtgtgtattcagagcctcgccccattggcaccagatacctgactcgtaatctgtaa

SEQ ID NO: 3558 - DNA, 2208 bp, Artificial Sequence
  source: /note="Description of Artificial Sequence: Synthetic polynucleotide"
atggctgccgatggttatcttccagattggctcgaggacactctctctgaaggaataagacagtggtggaagctcaaacctggcccaccaccgccaaagcccgcagagcggcataaggacgacagcaggggtcttgtgcttcctgggtacaagtacctcggacccttcaacggactcgacaagggggggccggtcaacgaggcagacgccgcggccctcgagcacgacaaggcctacgaccggcagctcgacagcggagacaacccgtacctcaagtacaaccacgccgacgcggagtttcaggagcgtcttaaagaagatacgtcttttgggggcaacctcggacgagcagtcttccaggcgaaaaagagggttcttgaacctctgggcctggttgaggaacctgttaagacggctccgggaaaaaagaggccggtagagcactctcctgtggagccagactcctcctcgggaaccggaaaggcgggccagcagcctgcaagaaaaagattgaatttcggtcagactggagacgcagactccgtacctgacccccagcctctcggacagccaccagcagccccctctggtctgggaactaatacgatggctacaggcagtggcgcaccaatggcagacaataacgagggcgccgacggagtgggtaattcctcgggaaattggcattgcgattccacatggatgggcgacagagtcatcaccaccagcacccgcacctgggctctgcccacctacaacaaccatctgtacaagcaaatttccagccaatcaggagcatcgaacgacaaccactactttggctacagcaccccctgggggtattttgacttcaacagattccactgccacttttcgccacgtgactggcaaagactcatcaacaacaactggggattccggcccaagagactcagcttcaagctctttaacattcaagtcaaggaggtcacgcagaatgacggtacgacgacgattgccaataaccttaccagcacggttcaggtctttactgactcggagtaccagctcccgtacgtcctcggctcggcgcatcaaggatgcctcccgccgttcccagcagacgtcttcatggtgccacagtatggatacctcaccctgaacaacgggagtcaggcggtaggacgctcttcattttactgcctggagtacttcccttctcagatgcttcgcacgggaaacaactttaccttcagctacacctttgaggacgtgccttttcacagcagctacgctcacagccaaagtctggaccgtctcatgaatcctctcatcgaccaatacctgtattacttgagcaaaacaaacgctccaagcggaaccaccacgatgtccaggcttcagttttctcaggccggagcgagtgacattcgggaccagtctagaaactggcttcctggaccctgttaccgccagcagcgagtatcaaagacagctgcggacaacaacaacagtgattactcgtggactggagctaccaagtaccacctcaatggaagagactctctggtgaacccgggcccagctatggccagccacaaggatgatgaagaaaaatattttcctcagagcggggttctcatcttcgggaaacaaggctcaaataaaactaatgtggacattgaaaaggttatgattacagacgaagaggaaatcaggaccaccaatcccgtggctacggagcagtatggttctgtatctaccaaccttcaaagcggcaacacacaagcagctacctcagatgtcaacacacaaggcgttcttcctggcatggtctggcaggacagagatgtgtacctgcaggggcccatctgggcaaagattcctcacacggacggacactttcacccttctcccctcatgggcggatttggattgaagcaccctcccccacagattctcatcaagaataccccggtacctgcgaatccttcgaccaccttcagtgcggcaaagtttgcttccttcatcacacagtattccacgggacaggtcagcgtggagatagagtgggagctgcagaaggagaacagcaaacgctggaaccccgagatccagtatacttccaactacaacaaatctgttaatgtggactttactgtggacactaatggtgtgtattcagagcctcgccccattggcaccagatacctgactcgtaatctgtaa

SEQ ID NO: 3559 - DNA, 2208 bp, Artificial Sequence
  source: /note="Description of Artificial Sequence: Synthetic polynucleotide"
atggctgccgatggttatcttccagattggctcgaggacactctctctgaaggaataagacagtggtggaagctcaaacctggcccaccaccgccaaagcccgcagagcggcataaggacgacagcaggggtcttgtgcttcctgggtacaagtacctcggacccttcaacggactcgacaagggggagccggtcaacgaggcagacgccgcggccctcgagcacgacaaggcctacgaccggcagctcgacagcggagacaacccgtacctcaagtacaaccacgccgacgcggagtttcaggagcgtcttaaagaagatacgtcttttgggggcaacctcggacgagcagtcttccaggcgaaaaagagggttcttgaacctctgggcctggttgaggaacctgttaagacggctccgggaaaaaagaggccggtagagcactctcctgtggagccagactcctcctcgggaaccggaaaggcgggccagcagcctgcaagaaaaagattgaatttcggtcagactggagacgcagactccgtacctgacccccagcctctcggacagccaccagcagccccctctggtctgggaactaatacgatggctacaggcagtggcgcaccaatggcagacaataacgagggcgccgacggagtgggtaattcctcgggaaattggcattgcgattccacatggatgggcgacagagtcatcaccaccagcacccgcacctggactctgcccacctacaacaaccatctgtacaagcaaatttccagccaatcaggagcatcgaacgacaaccactactttggctacagcaccccctgggggtattttgacttcaacagattccactgccacttttcgccacgtgactggcaaagactcatcaacaacaactggggattccggcccaagagactcagcttcaagctctttaacattcaagtcaaggaggtcacgcagaatgacggtacgacgacgattgccaataaccttaccagcacggttcaggtctttactgactcggagtaccagctcccgtacgtcctcggctcggcgcatcaaggatgcctcccgccgttcccagcagacgtcttcatggtgccacagtatggatacctcaccctgaacaacgggagtcaggcggtaggacgctcttcattttactgcctggagtacttcccttctcagatgcttcgcacgggaaacaactttaccttcagctacacctttgaggacgtgccttttcacagcagctacgctcacagccaaagtctggaccgtctcatgaatcctctcatcgaccaatacctgtattacttgagcaaaacaaacgctccaagcggaaccaccacgatgtccaggcttcagttttctcaggccggagcgagtgacattcgggaccagtctagaaactggcttcctggaccctgttaccgccagcagcgagtatcaaagacagctgcggacaacaacaacagtgattactcgtggactggagctaccaagtaccacctcaatggaagagactctctggtgaacccgggcccagctatggccagccacaaggatgatgaagaaaaatattttcctcagagcggggttctcatcttcgggaaacaaggctcaaataaaactaatgtggacattgaaaaggttatgattacagacgaagaggaaatcaggaccaccaatcccgtggctacggagcagtatggttctgtatctaccaaccttcaaagcggcaacacacaagcagctacctcagatgtcaacacacaaggcgttcttcctggcatggtctggcaggacagagatgtgtacctgcaggggcccatctgggcaaagattcctcacacggacggacactttcacccttctcccctcatgggcggatttggattgaagcaccctcccccacagattctcatcaagaataccccggtacctgcgaatccttcgaccaccttcagtgcggcaaagtttgcttccttcatcacacagtattccacgggacaggtcagcgtggagatagagtgggagctgcagaaggagaacagcaaacgctggaaccccgagatccagtatacttccaactacaacaaatctgttaatgtggactttactgtggacactaatggtgtgtattcagagcctcgccccattggcaccagatacctgactcgtaatctgtaa

SEQ ID NO: 3560 - DNA, 2208 bp, Artificial Sequence
  source: /note="Description of Artificial Sequence: Synthetic polynucleotide"
atggctgccgatggttatcttccagattggctcgaggacactctctctgaaggaataagacagtggtggaagctcaaacctggcccaccaccgccaaagcccgcagagcggcataaggacgacagcaggggtcttgtgcttcctgggtacaagtacctcggacccttcaacggactcgacaagggggagccggtcaacgaggcagacgccgcggtcctcgagcacgacaaggcctacgaccggcagctcgacagcggagacaacccgtacctcaagtacaaccacgccgacgcggagtttcaggagcgtcttaaagaagatacgtcttttgggggcaacctcggacgagcagtcttccaggcgaaaaagagggttcttgaacctctgggcctggttgaggaacctgttaagacggctccgggaaaaaagaggccggtagagcactctcctgtggagccagactcctcctcgggaaccggaaaggcgggccagcagcctgcaagaaaaagattgaatttcggtcagactggagacgcagactccgtacctgacccccagcctctcggacagccaccagcagccccctctggtctgggaactaatacgatggctacaggcagtggcgcaccaatggcagacaataacgagggcgccgacggagtgggtaattcctcgggaaattggcattgcgattccacatggatgggcgacagagtcatcaccaccagcacccgcacctgggctctgcccacctacaacaaccatctgtacaagcaaatttccagccaatcaggagcatcgaacgacaaccactactttggctacagcaccccctgggggtattttgacttcaacagattccactgccacttttcgccacgtgactggcaaagactcatcaacaacaactggggattccggcccaagagactcagcttcaagctctttaacattcaagtcaaggaggtcacgcagaatgacggtacgacgacgattgccaataaccttaccagcacggttcaggtctttactgactcggagtaccagctcccgtacgtcctcggctcggcgcatcaaggatgcctcccgccgttcccagcagacgtcttcatggtgccacagtatggatacctcaccctgaacaacgggagtcaggcggtaggacgctcttcattttactgcctggagtacttcccttctcagatgcttcgcacgggaaacaactttaccttcagctacacctttgaggacgtgccttttcacagcagctacgctcacagccaaagtctggaccgtctcatgaatcctctcatcgaccaatacctgtattacttgagcaaaacaaacgctccaagcggaaccaccacgatgtccaggcttcagttttctcaggccggagcgagtgacattcgggaccagtctagaaactggcttcctggaccctgttaccgccagcagcgagtatcaaagacagctgcggacaacaacaacagtgattactcgtggactggagctaccaagtaccacctcaatggaagagactctctggtgaacccgggcccagctatggccagccacaaggatgatgaagaaaaatattttcctcagagcggggttctcatcttcgggaaacaaggctcaaataaaactaatgtggacattgaaaaggttatgattacagacgaagaggaaatcaggaccaccaatcccgtggctacggagcagtatggttctgtatctaccaaccttcaaagcggcaacacacaagcagctacctcagatgtcaacacacaaggcgttcttcctggcatggtctggcaggacagagatgtgtacctgcaggggcccatctgggcaaagattcctcacacggacggacactttcacccttctcccctcatgggcggatttggattgaagcaccctcccccacagattctcatcaagaataccccggtacctgcgaatccttcgaccaccttcagtgcggcaaagtttgcttccttcatcacacagtattccacgggacaggtcagcgtggagatagagtgggagctgcagaaggagaacagcaaacgctggaaccccgagatccagtatacttccaactacaacaaatctgttaatgtggactttactgtggacactaatggtgtgtattcagagcctcgccccattggcaccagatacctgactcgtaatctgtaa

SEQ ID NO: 3561 - DNA, 2208 bp, Artificial Sequence
  source: /note="Description of Artificial Sequence: Synthetic polynucleotide"
atggctgccgatggttatcttccagattggctcgaggacactctctctgaaggaataagacagtggtggaagctcaaacctggcccaccaccgccaaagcccgcagagcggcataaggacgacagcaggggtcttgtgcttcctgggtacaagtacctcggacccttcaacggactcgacaagggggagccggtcaacgaggcagacgccgcggccctcgagcacgacaaggcctacgaccggcagctcgacagcggagacaacccgtacctcaagtacaaccacgccgacgcggagtttcaggagcgtcttaaagaagatacgtcttttgggggcaacctcggacgagcagtcttccaggcgaaaaagagggttcttgaacctctgggcctggttgaggaacctgttaagacggctccgggaaaaaagaggccggtagagcactctcctgtggagccagactcctcctcgggaaccggaaaggcgggccagcagcctgcaagaaaaagattgaatttcggtcagactggagacgcagactccgtacctgacccccagcctctcggacagccaccagcagccccctctggtctgggaactaatacgatggctacaggcagtggcgcaccaatggcagacaataacgagggcgccgacggagtgggtaattcctcgggaaattggcattgcgattccacatggatgggcgacagagtcatcaccaccagcacccacacctgggctctgcccacctacaacaaccatctgtacaagcaaatttccagccaatcaggagcatcgaacgacaaccactactttggctacagcaccccctgggggtattttgacttcaacagattccactgccacttttcgccacgtgactggcaaagactcatcaacaacaactggggattccggcccaagagactcagcttcaagctctttaacattcaagtcaaggaggtcacgcagaatgacggtacgacgacgattgccaataaccttaccagcacggttcaggtctttactgactcggagtaccagctcccgtacgtcctcggctcggcgcatcaaggatgcctcccgccgttcccagcagacgtcttcatggtgccacagtatggatacctcaccctgaacaacgggagtcaggcggtaggacgctcttcattttactgcctggagtacttcccttctcagatgcttcgcacgggaaacaactttaccttcagctacacctttgaggacgtgccttttcacagcagctacgctcacagccaaagtctggaccgtctcatgaatcctctcatcgaccaatacctgtattacttgagcaaaacaaacgctccaagcggaaccaccacgatgtccaggcttcagttttctcaggccggagcgagtgacattcgggaccagtctagaaactggcttcctggaccctgttaccgccagcagcgagtatcaaagacagctgcggacaacaacaacagtgattactcgtggactggagctaccaagtaccacctcaatggaagagactctctggtgaacccgggcccagctatggccagccacaaggatgatgaagaaaaatattttcctcagagcggggttctcatcttcgggaaacaaggctcaaataaaactaatgtggacattgaaaaggttatgattacagacgaagaggaaatcaggaccaccaatcccgtggctacggagcagtatggttctgtatctaccaaccttcaaagcggcaacacacaagcagctacctcagatgtcaacacacaaggcgttcttcctggcatggtctggcaggacagagatgtgtacctgcaggggcccatctgggcaaagattcctcacacggacggacactttcacccttctcccctcatgggcggatttggattgaagcaccctcccccacagattctcatcaagaataccccggtacctgcgaatccttcgaccaccttcagtgcggcaaagtttgcttccttcatcacacagtattccacgggacaggtcagcgtggagatagagtgggagctgcagaaggagaacagcaaacgctggaaccccgagatccagtatacttccaactacaacaaatctgttaatgtggactttactgtggacactaatggtgtgtattcagagcctcgccccattggcaccagatacctgactcgtaatctgtaa

SEQ ID NO: 3562 - DNA, 2208 bp, Artificial Sequence
  source: /note="Description of Artificial Sequence: Synthetic polynucleotide"
atggctgccgatggttatcttccagattggctcgaggacactctctctgaaggaataagacagtggtggaagctcaaacctggcccaccaccgccaaagcccgcagagcggcataaggacgacagcaggggtcttgtgcttcctgggtacaagtacctcggacccttcaacggactcgacaagggggagccggtcaacgaggcagacgccgcggccctcgagcacgacaaggcctacgaccggcagctcgacagcggagacaacccgtacctcaagtacaaccacgccgacgcggagtttcaggagcgtcttaaagaagatacgtcttttgggggcaacctcggacgagcagtcttccaggcgaaaaagagggttcttgaacctctgggcctggttgaggaacctgttaagacggctccgggaaaaaagaggccggtagagcactctcctgtggagccagactcctcctcgggaaccggaaaggcgggccagcagcctgcaagaaaaagattgaatttcggtcagactggagacgcagactccgtacctgacccccagcctctcggacagccaccagcagccccctctggtctgggaactaatacgatggctacaggcagtggcgcaccaatggcagacaataacgagggcgccgacggagtgggtaattcctcgggaaattggcattgcgattccacatggatgggcgacagagtcatcaccaccagcacccgcacctgggctctgcccacctacaacaaccatctgtacaagcaaatttccagccaatcaggagcatcgaacgacaaccactactttggctacagcaccccctgggggtattttgacttcaacagattccactgccacttttcgccacgtgactggcaaagactcatcaacaacaactggggattccggcccaagagactcagcttcaagctctttaacattcaagtcaaggaggtcacgcagaatgacggtacgacgacgattgccaataaccttaccagcacggttcaggtctttactgactcggagtaccagctcccgtacgtcctcggctcggcgcatcaaggatgcctcccgccgttcccagcagacgtcttcatggtgccacagtatggatacctcaccctgaacaacgggagtcaggcggtaggacgctcttcattttactgcctggagtacttcccttctcagatgcttcgcacgggaaacaactttaccttcagctacacctttgaggacgtgccttttcacagcagctacgctcacagccaaagtctggaccgtctcatgaatcctctcatcgaccaatacctgtattacttgagcaaaacaaacgctccaagcggaaccaccacgatgtccaggcttcagttttctcaggccggagcgagtggcattcgggaccagtctagaaactggcttcctggaccctgttaccgccagcagcgagtatcaaagacagctgcggacaacaacaacagtgattactcgtggactggagctaccaagtaccacctcaatggaagagactctctggtgaacccgggcccagctatggccagccacaaggatgatgaagaaaaatattttcctcagagcggggttctcatcttcgggaaacaaggctcaaataaaactaatgtggacattgaaaaggttatgattacagacgaagaggaaatcaggaccaccaatcccgtggctacggagcagtatggttctgtatctaccaaccttcaaagcggcaacacacaagcagctacctcagatgtcaacacacaaggcgttcttcctggcatggtctggcaggacagagatgtgtacctgcaggggcccatctgggcaaagattcctcacacggacggacactttcacccttctcccctcatgggcggatttggattgaagcaccctcccccacagattctcatcaagaataccccggtacctgcgaatccttcgaccaccttcagtgcggcaaagtttgcttccttcatcacacagtattccacgggacaggtcagcgtggagatagagtgggagctgcagaaggagaacagcaaacgctggaaccccgagatccagtatacttccaactacaacaaatctgttaatgtggactttactgtggacactaatggtgtgtattcagagcctcgccccattggcaccagatacctgactcgtaatctgtaa

SEQ ID NO: 3563 - DNA, 2208 bp, Artificial Sequence
  source: /note="Description of Artificial Sequence: Synthetic polynucleotide"
atggctgccgatggttatcttccagattggctcgaggacactctctctgaaggaataagacagtggtggaagctcaaacctggcccaccaccgccaaagcccgcagagcggcataaggacgacagcaggggtcttgtgcttcctgggtacaagtacctcggacccttcaacggactcgacaagggggagccggtcaacgaggcagacgccgcggccctcgagcacgacaaggcctacgaccggcagctcgacagcggagacaacccgtacctcaagtacaaccacgccgacgcggagtttcaggagcgtcttaaagaagatacgtcttttgggggcaacctcggacgagtagtcttccaggcgaaaaagagggttcttgaacctctgggcctggttgaggaacctgttaagacggctccgggaaaaaagaggccggtagagcactctcctgtggagccagactcctcctcgggaaccggaaaggcgggccagcagcctgcaagaaaaagattgaatttcggtcagactggagacgcagactccgtacctgacccccagcctctcggacagccaccagcagccccctctggtctgggaactaatacgatggctacaggcagtggcgcaccaatggcagacaataacgagggcgccgacggagtgggtaattcctcgggaaattggcattgcgattccacatggatgggcgacagagtcatcaccaccagcacccgcacctgggctctgcccacctacaacaaccatctgtacaagcaaatttccagccaatcaggagcatcgaacgacaaccactactttggctacagcaccccctgggggtattttgacttcaacagattccactgccacttttcgccacgtgactggcaaagactcatcaacaacaactggggattccggcccaagagactcagcttcaagctctttaacattcaagtcaaggaggtcacgcagaatgacggtacgacgacgattgccaataaccttaccagcacggttcaggtctttactgactcggagtaccagctcccgtacgtcctcggctcggcgcatcaaggatgcctcccgccgttcccagcagacgtcttcatggtgccacagtatggatacctcaccctgaacaacgggagtcaggcggtaggacgctcttcattttactgcctggagtacttcccttctcagatgcttcgcacgggaaacaactttaccttcagctacacctttgaggacgtgccttttcacagcagctacgctcacagccaaagtctggaccgtctcatgaatcctctcatcgaccaatacctgtattacttgagcaaaacaaacgctccaagcggaaccaccacgatgtccaggcttcagttttctcaggccggagcgagtgacattcgggaccagtctagaaactggcttcctggaccctgttaccgccagcagcgagtatcaaagacagctgcggacaacaacaacagtgattactcgtggactggagctaccaagtaccacctcaatggaagagactctctggtgaacccgggcccagctatggccagccacaaggatgatgaagaaaaatattttcctcagagcggggttctcatcttcgggaaacaaggctcaaataaaactaatgtggacattgaaaaggttatgattacagacgaagaggaaatcaggaccaccaatcccgtggctacggagcagtatggttctgtatctaccaaccttcaaagcggcaacacacaagcagctacctcagatgtcaacacacaaggcgttcttcctggcatggtctggcaggacagagatgtgtacctgcaggggcccatctgggcaaagattcctcacacggacggacactttcacccttctcccctcatgggcggatttggattgaagcaccctcccccacagattctcatcaagaataccccggtacctgcgaatccttcgaccaccttcagtgcggcaaagtttgcttccttcatcacacagtattccacgggacaggtcagcgtggagatagagtgggagctgcagaaggagaacagcaaacgctggaaccccgagatccagtatacttccaactacaacaaatctgttaatgtggactttactgtggacactaatggtgtgtattcagagcctcgccccattggcaccagatacctgactcgtaatctgtaa

SEQ ID NO: 3564 - DNA, 2208 bp, Artificial Sequence
  source: /note="Description of Artificial Sequence: Synthetic polynucleotide"
atggctgccgatggttatcttccagattggctcgaggacactctctctgaaggaataagacagtggtggaagctcaaacctggcccaccaccgccaaagcccgcagagcggcataaggacgacagcaggggtcttgtgcttcctgggtacaagtacctcggacccttcaacggactcgacaagggggagccggtcaacgaggcagacgccgcggccctcgagcacgacaaggcctacgaccggcagctcgacagcggagacaacccgtacctcaagtacaaccacgccgacgcggagtttcaggagcgtcttaaagaagatacgtcttttgggggcaacctcggacgagcagtcttccaggcgaaaaagagggttcttgaacctctgggcctggttgaggaacctgttaagacggctccgggaaaaaagaggccggtagagcactctcctgtggagccagactcctcctcgggaaccggaaaggcgggccagcagcctgcaagaaaaagattgaatttcggtcagactggagacgcagactccgtacctgacccccagcctctcggacagccaccagcagccccctctggtctgggaactaatacgatggctacaggcagtggcgcaccaatggcagacaataacgagggcgccgacggagtgggtaattcctcgggaaattggcattgcgattccacatggatgggcgacagagtcatcaccaccagcacccgcacctgggctctgcccacctacaacaaccatctgtacaagcaaatttccagccaatcaggagcatcgaacgacaaccactactttggctacagcaccccctgggggtattttgacttcaacagattccactgccacttttcgccacgtgactggcaaagactcatcaacaacaactggggattccggcccaagagactcagcttcaagctctttaacattcaagtcaaggaggtcacgcagaatgacggtacgacgacgattgccaataaccttaccagcacggttcaggtctttactgactcggagtaccagctcccgtacatcctcggctcggcgcatcaaggatgcctcccgccgttcccagcagacgtcttcatggtgccacagtatggatacctcaccctgaacaacgggagtcaggcggtaggacgctcttcattttactgcctggagtacttcccttctcagatgcttcgcacgggaaacaactttaccttcagctacacctttgaggacgtgccttttcacagcagctacgctcacagccaaagtctggaccgtctcatgaatcctctcatcgaccaatacctgtattacttgagcaaaacaaacgctccaagcggaaccaccacgatgtccaggcttcagttttctcaggccggagcgagtgacattcgggaccagtctagaaactggcttcctggaccctgttaccgccagcagcgagtatcaaagacagctgcggacaacaacaacagtgattactcgtggactggagctaccaagtaccacctcaatggaagagactctctggtgaacccgggcccagctatggccagccacaaggatgatgaagaaaaatattttcctcagagcggggttctcatcttcgggaaacaaggctcaaataaaactaatgtggacattgaaaaggttatgattacagacgaagaggaaatcaggaccaccaatcccgtggctacggagcagtatggttctgtatctaccaaccttcaaagcggcaacacacaagcagctacctcagatgtcaacacacaaggcgttcttcctggcatggtctggcaggacagagatgtgtacctgcaggggcccatctgggcaaagattcctcacacggacggacactttcacccttctcccctcatgggcggatttggattgaagcaccctcccccacagattctcatcaagaataccccggtacctgcgaatccttcgaccaccttcagtgcggcaaagtttgcttccttcatcacacagtattccacgggacaggtcagcgtggagatagagtgggagctgcagaaggagaacagcaaacgctggaaccccgagatccagtatacttccaactacaacaaatctgttaatgtggactttactgtggacactaatggtgtgtattcagagcctcgccccattggcaccagatacctgactcgtaatctgtaa

SEQ ID NO: 3565 - DNA, 2208 bp, Artificial Sequence
  source: /note="Description of Artificial Sequence: Synthetic polynucleotide"
atggctgccgatggttatcttccagattggctcgaggacactctctctgaaggaataagacagtggtggaagctcaaacctggcccaccaccgccaaagcccgcagagcggcataaggacgacagcaggggtcttgtgcttcctgggtacaagtacctcggacccttcaacggactcgacaagggggagccggtcaacgaggcagacgccgcggccctcgagcacgacaaggcctacgaccggcagctcgacagcggagacaacccgtacctcaagtacaaccacgccgacgcggagtttcaggagcgtcttaaagaagatacgtcttttgggggcaacctcggacgagcagtcttccaggcgaaaaagagggttcttgaacctctgggcctggttgaggaacctgttaagacggctccgggaaaaaagaggccggtagagcactctcctgtggagccagactcctcctcgggaaccggaaaggcgggccagcagcctgcaagaaaaagattgaatttcggtcagactggagacgcagactccgtacctgacccccagcctctcggacagccaccagcagccccctctggtctgggaactaatacgatggctacaggcagtggcgcaccaatggcagacaataacgagggcgtcgacggagtgggtaattcctcgggaaattggcattgcgattccacatggatgggcgacagagtcatcaccaccagcacccgcacctgggctctgcccacctacaacaaccatctgtacaagcaaatttccagccaatcaggagcatcgaacgacaaccactactttggctacagcaccccctgggggtattttgacttcaacagattccactgccacttttcgccacgtgactggcaaagactcatcaacaacaactggggattccggcccaagagactcagcttcaagctctttaacattcaagtcaaggaggtcacgcagaatgacggtacgacgacgattgccaataaccttaccagcacggttcaggtctttactgactcggagtaccagctcccgtacgtcctcggctcggcgcatcaaggatgcctcccgccgttcccagcagacgtcttcatggtgccacagtatggatacctcaccctgaacaacgggagtcaggcggtaggacgctcttcattttactgcctggagtacttcccttctcagatgcttcgcacgggaaacaactttaccttcagctacacctttgaggacgtgccttttcacagcagctacgctcacagccaaagtctggaccgtctcatgaatcctctcatcgaccaatacctgtattacttgagcaaaacaaacgctccaagcggaaccaccacgatgtccaggcttcagttttctcaggccggagcgagtgacattcgggaccagtctagaaactggcttcctggaccctgttaccgccagcagcgagtatcaaagacagctgcggacaacaacaacagtgattactcgtggactggagctaccaagtaccacctcaatggaagagactctctggtgaacccgggcccagctatggccagccacaaggatgatgaagaaaaatattttcctcagagcggggttctcatcttcgggaaacaaggctcaaataaaactaatgtggacattgaaaaggttatgattacagacgaagaggaaatcaggaccaccaatcccgtggctacggagcagtatggttctgtatctaccaaccttcaaagcggcaacacacaagcagctacctcagatgtcaacacacaaggcgttcttcctggcatggtctggcaggacagagatgtgtacctgcaggggcccatctgggcaaagattcctcacacggacggacactttcacccttctcccctcatgggcggatttggattgaagcaccctcccccacagattctcatcaagaataccccggtacctgcgaatccttcgaccaccttcagtgcggcaaagtttgcttccttcatcacacagtattccacgggacaggtcagcgtggagatagagtgggagctgcagaaggagaacagcaaacgctggaaccccgagatccagtatacttccaactacaacaaatctgttaatgtggactttactgtggacactaatggtgtgtattcagagcctcgccccattggcaccagatacctgactcgtaatctgtaa

SEQ ID NO: 3566 - DNA, 2208 bp, Artificial Sequence
  source: /note="Description of Artificial Sequence: Synthetic polynucleotide"
atggctgccgatggttatcttccagattggctcgaggacactctctctgaaggaataagacagtggtggaagctcaaacctggcccaccaccgccaaagcccgcagagcggcataaggacgacagcaggggtcttgtgcttcctgggtacaagtacctcggacccttcaacggactcgacaagggggagccggtcaacgaggcagacgccgcggccctcgagcacgacaaggcctacgaccggcagctcgacagcggagacaacccgtacctcaagtacaaccacgccgacgcggagtttcaggagcgtcttaaagaagatacgtcttttgggggcaacctcggacgagcagtcttccaggcgaaaaagagggttcttgaacctctgggcctggttgaggaacctgttaagacggctccgggaaaaaagaggccggtagagcactctcctgtggagccagactcctcctcgggaaccggaaaggcgggccagcagcctgcaagaaaaagattgaatttcggtcagactggagacgcagactccgtacctgacccccagcctctcggacagccaccagcagccccctctggtctgggaactaatacgatggctacaggcagtggcgcaccaatggcagacaataacgagggcgccgacggagtgggtaattcctcgggaaattggcattgcgattccacatggatgggcgacagagtcatcaccaccagcacccgcacctgggctctgcccacctacaacaaccatctgtacaagcaaatttccagccaatcaggagcatcgaacgacaaccactactttggctacagcaccccctgggggtattttgacttcaacagattccactgccacttttcgccacgtgactggcaaagactcatcaacaacaactggggattccggcccaagagactcagcttcaagctctttaacattcaagtcaaggaggtcacgcagaatgacggtacgacgacgattgccaataaccttaccagcacggttcaggtctttactgactcggagtaccagctcccgtacgtcctcggctcggcgcatcaaggatgcctcccgccgttcccagcagacgtcttcatggtgccacagtatggatacctcaccctgaacaacgggagtcaggcggtaggacgctcttcattttactgcctggagtacttcccttctcagatgcttcgcacgggaaacaactttaccttcagctacacctttgaggacgtgccttttcacagcagctacgctcacagccaaagtctggaccgtctcatgaatcctctcatcgaccaatacctgtattacttgagcaaaacaaacgctccaagcggaaccaccacgatgtccaggcttcagttttctcaggccggagcgagtgacattcgggaccagtctagaaactggcttcctggaccctgttaccgccagcagcgagtatcaaagacagctgcggacaacaacaacagtgattactcgtggactggagctaccaagtaccacctcaatggaagaggctctctggtgaacccgggcccagctatggccagccacaaggatgatgaagaaaaatattttcctcagagcggggttctcatcttcgggaaacaaggctcaaataaaactaatgtggacattgaaaaggttatgattacagacgaagaggaaatcaggaccaccaatcccgtggctacggagcagtatggttctgtatctaccaaccttcaaagcggcaacacacaagcagctacctcagatgtcaacacacaaggcgttcttcctggcatggtctggcaggacagagatgtgtacctgcaggggcccatctgggcaaagattcctcacacggacggacactttcacccttctcccctcatgggcggatttggattgaagcaccctcccccacagattctcatcaagaataccccggtacctgcgaatccttcgaccaccttcagtgcggcaaagtttgcttccttcatcacacagtattccacgggacaggtcagcgtggagatagagtgggagctgcagaaggagaacagcaaacgctggaaccccgagatccagtatacttccaactacaacaaatctgttaatgtggactttactgtggacactaatggtgtgtattcagagcctcgccccattggcaccagatacctgactcgtaatctgtaa

SEQ ID NO: 3567 - DNA, 2208 bp, Artificial Sequence
  source: /note="Description of Artificial Sequence: Synthetic polynucleotide"
atggctgccgatggttatcttccagattggctcgaggacactctctctgaaggaataagacagtggtggaagctcaaacctggcccaccaccgccaaagcccgcagagcggcataaggacgacagcaggggtcttgtgcttcctgggtacaagtacctcggacccttcaacggactcgacaagggggagccggtcaacgaggcagacgccgcggccctcgagcacgacaaggcctacgaccggcagctcgacagcggagacaacccgtacctcaagtacaaccacgccgacgcggagtttcaggagcgtcttaaagaagatacgtcttttgggggcaacctcggacgagcagtcttccaggcgaaaaagagggttcttgaacctctgggcctggttgaggaacctgttaagacggctccgggaaaaaagaggccggtagagcactctcctgtggagccagactcctcctcgggaaccggaaaggcgggccagcagcctgcaagaaaaagattgaatttcggtcagactggagacgcagactccgtacctgacccccagcctctcggacagccaccagcagccccctctggtctgggaactaatacgatggctacaggcagtggcgcaccaatggcagacaataacgagggcgccgacggagtgggtaattcctcgggaaattggcattgcgattccacatggatgggcgacagagtcatcaccaccagcacccgcacctgggctctgcccacctacaacaaccatctgtacaagcaaatttccagccaatcaggagcatcgaacgacaaccactactttggctacagcaccccctgggggtattttgacttcaacagattccactgccacttttcgccacgtgactggcaaagactcatcaacaacaactggggattccggcccaagagactcagcttcaagctctttaacattcaagtcaaggaggtcacgcagaatgacggtacgacgacgattgccaataaccttaccagcacggttcaggtctttactgactcggagtaccagctcccgtacgtcctcggctcggcgcatcaaggatgcctcccgccgttcccagcagacgtcttcatggtgccacagtatggatacctcaccctgaacaacgggagtcaggcggtaggacgctcttcattttactgcctggagtacttcccttctcagatgcttcgcacgggaaacaactttaccttcagctacacctttgaggacgtgccttttcacagcagctacgctcacagccaaagtctggaccgtctcatgaatcctctcatcgaccaatacctgtattacttgagcaaaacaaacgctccaagcggaaccaccacgatgtccaggcttcagttttctcaggccggagcgagtgacattcgggaccagtctagaaactggcttcctggaccctgttaccgccagcagcgagtatcaaagacagctgcggacaacaacaacagtgattactcgtggactggagctaccaagtaccacctcaatggaagagactctctggtgaacccgggcccagctatggccagccacaaggatgatgaagaaaaatattttcctcagagcggggttctcatcttcgggaaacaaggctcaaataaaactaatgtggacattgaaaaggttatgattacagacgaagaggaaatcaggaccaccaatcccgtggctacggagcagtatggttctgtatctaccaaccttcaaagcggcaacacacaagcagctaccccagatgtcaacacacaaggcgttcttcctggcatggtctggcaggacagagatgtgtacctgcaggggcccatctgggcaaagattcctcacacggacggacactttcacccttctcccctcatgggcggatttggattgaagcaccctcccccacagattctcatcaagaataccccggtacctgcgaatccttcgaccaccttcagtgcggcaaagtttgcttccttcatcacacagtattccacgggacaggtcagcgtggagatagagtgggagctgcagaaggagaacagcaaacgctggaaccccgagatccagtatacttccaactacaacaaatctgttaatgtggactttactgtggacactaatggtgtgtattcagagcctcgccccattggcaccagatacctgactcgtaatctgtaa

SEQ ID NO: 3568 - DNA, 2208 bp, Artificial Sequence
  source: /note="Description of Artificial Sequence: Synthetic polynucleotide"
atggctgccgatggttatcttccagattggctcgaggacactctctctgaaggaataagacagtggtggaagctcaaacctggcccaccaccgccaaagcccgcagagcggcataaggacgacagcaggggtcttgtgcttcctgggtacaagtacctcggacccttcaacggactcgacaagggggagccggtcaacgaggcagacgccgcggccctcgagcacgacaaggcctacgaccggcagctcgacagcggagacaacccgtacctcaagtacaaccacgccgacgcggagtttcaggagcgtcttaaagaagatacgtcttttgggggcaacctcggacgagcagtcttccaggcgaaaaagagggttcttgaacctctgggcctggttgaggaacctgttaagacggctccgggaaaaaagaggccggtagagcactctcctgtggagccagactcctcctcgggaaccggaaaggcgggccagcagcctgcaagaaaaagattgaatttcggtcagactggagacgcagactccgtacctgacccccagcctctcggacagccaccagcagccccctctggtctgggaactaatacgatggctacaggcagtggcgcaccaatggcagacaataacgagggcgccgacggagtgggtaattcctcgggaaattggcattgcgattccacatggatgggcgacagagtcatcaccaccagcacccgcacctgggctctgcccacctacaacaaccatctgtacaagcaaatttccagccaatcaggagcatcgaacgacaaccactactttggctacagcaccccctgggggtattttgacttcaacagattccactgccacttttcgccacgtgactggcaaagactcatcaacaacaactggggattccggcccaagagactcagcttcaagctctttaacattcaagtcaaggaggtcacgcagaatgacggtacgacgacgattgccaataaccttaccagcacggttcaggtctttactgactcggagtaccagctcccgtacgtcctcggctcggcgcatcaaggatgcctcccgccgttcccagcagacgtcttcatggtgccacagtatggatacctcaccctgaacaacgggagtcaggcggtaggacgctcttcattttactgcctggagtacttcccttctcagatgcttcgcacgggaaacaactttaccttcagctacacctttgaggacgtgccttttcacagcagctacgctcacagccaaagtctggaccgtctcatgaatcctctcatcgaccaatacctgtattacttgagcaaaacaaacgctccaagcggaaccaccacgatgtccaggcttcagttttctcaggccggagcgagtgacattcgggaccagtctagaaactggcttcctggaccctgttaccgccagcagcgagtatcaaagacagctgcggacaacaacaacagtgattactcgtggactggagctaccaagtaccacctcaatggaagagactctctggtgaacccgggcccagctatggccagccacaaggatgatgaagaaaaatattttcctcagagcggggttctcatcttcgggaaacaaggctcaaataaaactaatgtggacattgaaaaggttatgattacagacgaagaggaaatcaggaccaccaatcccgtggctacggagcagtatggttctgtatctaccaaccttcaaagcggcaacacacaagcagctacctcagatgtcaacacacaaggcgttcttcctggcatggtctggcaggacagagatgtgtacctgcaggggcccatctgggcaaagattcctcacacggacggacactttcacccttctcccctcatgggcggatttggattgaagcaccctcccccacagattctcatcaagaataccccggtacctgcgaatccttcgaccaccttcagtgtggcaaagtttgcttccttcatcacacagtattccacgggacaggtcagcgtggagatagagtgggagctgcagaaggagaacagcaaacgctggaaccccgagatccagtatacttccaactacaacaaatctgttaatgtggactttactgtggacactaatggtgtgtattcagagcctcgccccattggcaccagatacctgactcgtaatctgtaa

SEQ ID NO: 3569 - DNA, 2208 bp, Artificial Sequence
  source: /note="Description of Artificial Sequence: Synthetic polynucleotide"
atggctgccgatggttatcttccagattggctcgaggacactctctctgaaggaataagacagtggtggaagctcaaacctggcccaccaccgccaaagcccgcagagcggcataaggacgacagcaggggtcttgtgcttcctgggtacaagtacctcggacccttcaacggactcgacaagggggagccggtcaacgaggcagacgccgcggccctcgagcacgacaaggcctacgaccggcagctcgacagcggagacaacccgtacctcaagtacaaccacgccgacgcggagtttcaggagcgtcttaaagaagatacgtcttttgggggcaacctcggacgagcagtcttccaggcgaaaaagagggttcttgaacctctgggcctggttgaggaacctgttaagacggctccgggaaaaaagaggccggtagagcactctcctgtggagccagactcctcctcgggaaccggaaaggcgggccagcagcctgcaagaaaaagattgaatttcggtcagactggagacgcagactccgtacctgacccccagcctctcggacagccaccagcagccccctctggtctgggaactaatacgatggctacaggcagtggcgcaccaatggcagacaataacgagggcgccgacggagtgggtaattcctcgggaaattggcattgcgattccacatggatgggcgacagagtcatcaccaccagcacccgcacctgggctctgcccacctacaacaaccatctgtacaagcaaatttccagccaatcaggagcatcgaacgacaaccactactttggctacagcaccccctgggggtattttgacttcaacagattccactgccacttttcgccacgtgactggcaaagactcatcaacaacaactggggattccggcccaagagactcagcttcaagctctttaacattcaagtcaaggaggtcacgcagaatgacggtacgacgacgattgccaataaccttaccagcacggttcaggtctttactgactcggagtaccagctcccgtacgtcctcggctcggcgcatcaaggatgcctcccgccgttcccagcagacgtcttcatggtgccacagtatggatacctcaccctgaacaacgggagtcaggcggtaggacgctcttcattttactgcctggagtacttcccttctcagatgcttcgcacgggaaacaactttaccttcagctacacctttgaggacgtgccttttcgcagcagctacgctcacagccaaagtctggaccgtctcatgaatcctctcatcgaccaatacctgtattacttgagcaaaacaaacgctccaagcggaaccaccacgatgtccaggcttcagttttctcaggccggagcgagtgacattcgggaccagtctagaaactggcttcctggaccctgttaccgccagcagcgagtatcaaagacagctgcggacaacaacaacagtgattactcgtggactggagctaccaagtaccacctcaatggaagagactctctggtgaacccgggcccagctatggccagccacaaggatgatgaagaaaaatattttcctcagagcggggttctcatcttcgggaaacaaggctcaaataaaactaatgtggacattgaaaaggttatgattacagacgaagaggaaatcaggaccaccaatcccgtggctacggagcagtatggttctgtatctaccaaccttcaaagcggcaacacacaagcagctacctcagatgtcaacacacaaggcgttcttcctggcatggtctggcaggacagagatgtgtacctgcaggggcccatctgggcaaagattcctcacacggacggacactttcacccttctcccctcatgggcggatttggattgaagcaccctcccccacagattctcatcaagaataccccggtacctgcgaatccttcgaccaccttcagtgcggcaaagtttgcttccttcatcacacagtattccacgggacaggtcagcgtggagatagagtgggagctgcagaaggagaacagcaaacgctggaaccccgagatccagtatacttccaactacaacaaatctgttaatgtggactttactgtggacactaatggtgtgtattcagagcctcgccccattggcaccagatacctgactcgtaatctgtaa

SEQ ID NO: 3570 - DNA, 2208 bp, Artificial Sequence
  source: /note="Description of Artificial Sequence: Synthetic polynucleotide"
atggctgccgatggttatcttccagattggctcgaggacactctctctgaaggaataagacagtggtggaagctcaaacctggcccaccaccgccaaagcccgcagagcggcataaggacgacagcaggggtcttgtgcttcctgggtacaagtacctcggacccttcaacggactcgacaagggggagccggtcaacgaggcagacgccgcggccctcgagcacgacaaggcctacgaccggcagctcgacagcggagacaacccgtacctcaagtacaaccacgccgacgcggagtttcaggagcgtcttaaagaagatacgtcttttgggggcaacctcggacgagcagtcttccaggcgaaaaagagggttcttgaacctctgggcctggttgaggaacctgttaagacggctccgggaaaaaagaggccggtagagcactctcctgtggagccagactcctcctcgggaaccggaaaggcggaccagcagcctgcaagaaaaagattgaatttcggtcagactggagacgcagactccgtacctgacccccagcctctcggacagccaccagcagccccctctggtctgggaactaatacgatggctacaggcagtggcgcaccaatggcagacaataacgagggcgccgacggagtgggtaattcctcgggaaattggcattgcgattccacatggatgggcgacagagtcatcaccaccagcacccgcacctgggctctgcccacctacaacaaccatctgtacaagcaaatttccagccaatcaggagcatcgaacgacaaccactactttggctacagcaccccctgggggtattttgacttcaacagattccactgccacttttcgccacgtgactggcaaagactcatcaacaacaactggggattccggcccaagagactcagcttcaagctctttaacattcaagtcaaggaggtcacgcagaatgacggtacgacgacgattgccaataaccttaccagcacggttcaggtctttactgactcggagtaccagctcccgtacgtcctcggctcggcgcatcaaggatgcctcccgccgttcccagcagacgtcttcatggtgccacagtatggatacctcaccctgaacaacgggagtcaggcggtaggacgctcttcattttactgcctggagtacttcccttctcagatgcttcgcacgggaaacaactttaccttcagctacacctttgaggacgtgccttttcacagcagctacgctcacagccaaagtctggaccgtctcatgaatcctctcatcgaccaatacctgtattacttgagcaaaacaaacgctccaagcggaaccaccacgatgtccaggcttcagttttctcaggccggagcgagtgacattcgggaccagtctagaaactggcttcctggaccctgttaccgccagcagcgagtatcaaagacagctgcggacaacaacaacagtgattactcgtggactggagctaccaagtaccacctcaatggaagagactctctggtgaacccgggcccagctatggccagccacaaggatgatgaagaaaaatattttcctcagagcggggttctcatcttcgggaaacaaggctcaaataaaactaatgtggacattgaaaaggttatgattacagacgaagaggaaatcaggaccaccaatcccgtggctacggagcagtatggttctgtatctaccaaccttcaaagcggcaacacacaagcagctacctcagatgtcaacacacaaggcgttcttcctggcatggtctggcaggacagagatgtgtacctgcaggggcccatctgggcaaagattcctcacacggacggacactttcacccttctcccctcatgggcggatttggattgaagcaccctcccccacagattctcatcaagaataccccggtacctgcgaatccttcgaccaccttcagtgcggcaaagtttgcttccttcatcacacagtattccacgggacaggtcagcgtggagatagagtgggagctgcagaaggagaacagcaaacgctggaaccccgagatccagtatacttccaactacaacaaatctgttaatgtggactttactgtggacactaatggtgtgtattcagagcctcgccccattggcaccagatacctgactcgtaatctgtaa

SEQ ID NO: 3571 - DNA, 2208 bp, Artificial Sequence
  source: /note="Description of Artificial Sequence: Synthetic polynucleotide"
atggctgccgatggttatcttccagattggctcgaggacactctctctgaaggaataagacagtggtggaagctcaaacctggcccaccaccgccaaagcccgcagagcggcataaggacgacagcaggggtcttgtgcttcctgggtacaagtacctcggacccttcaacggactcgacaagggggagccggtcaacgaggcagacgccgcggccctcgagcacgacaaggcctacgaccggcagctcgacagcggagacaacccgtacctcaagtacaaccacgccgacgcggagtttcaggagcgtcttaaagaagatacgtcttttgggggcaacctcggacgagcagtcttccaggcgaaaaagagggttcttgaacctctgggcctggttgaggaacctgttaagacggctccgggaaaaaagaggccggtagagcactctcctgtggagccagactcctcctcgggaaccggaaaggcgggccagcagcctgcaagaaaaagattgaatttcggtcagactggagacgcagactccgtacctgacccccagcctctcggacagccaccagcagccccctctggtctgggaactaatacgatggctacaggcagtggcgcaccaatggcagacaataacgagggcgccgacggagtgggtaattcctcgggaaattggcattgcgattccacatggatgggcgacagagtcatcaccaccagcacccgcacctgggctctgcccacctacaacaaccatctgtacaagcaaatttccagccaatcaggagcatcgaacgacaaccactactttggctacagcaccccctgggggtattttgacttcaacagattccactgccacttttcgccacgtgactggcaaagactcatcaacaacaactggggattccggcccaagagactcagcttcaagctctttaacattcaagtcaaggaggtcacgcagaatgacggtacgacgacgattgccaataaccttaccaacacggttcaggtctttactgactcggagtaccagctcccgtacgtcctcggctcggcgcatcaaggatgcctcccgccgttcccagcagacgtcttcatggtgccacagtatggatacctcaccctgaacaacgggagtcaggcggtaggacgctcttcattttactgcctggagtacttcccttctcagatgcttcgcacgggaaacaactttaccttcagctacacctttgaggacgtgccttttcacagcagctacgctcacagccaaagtctggaccgtctcatgaatcctctcatcgaccaatacctgtattacttgagcaaaacaaacgctccaagcggaaccaccacgatgtccaggcttcagttttctcaggccggagcgagtgacattcgggaccagtctagaaactggcttcctggaccctgttaccgccagcagcgagtatcaaagacagctgcggacaacaacaacagtgattactcgtggactggagctaccaagtaccacctcaatggaagagactctctggtgaacccgggcccagctatggccagccacaaggatgatgaagaaaaatattttcctcagagcggggttctcatcttcgggaaacaaggctcaaataaaactaatgtggacattgaaaaggttatgattacagacgaagaggaaatcaggaccaccaatcccgtggctacggagcagtatggttctgtatctaccaaccttcaaagcggcaacacacaagcagctacctcagatgtcaacacacaaggcgttcttcctggcatggtctggcaggacagagatgtgtacctgcaggggcccatctgggcaaagattcctcacacggacggacactttcacccttctcccctcatgggcggatttggattgaagcaccctcccccacagattctcatcaagaataccccggtacctgcgaatccttcgaccaccttcagtgcggcaaagtttgcttccttcatcacacagtattccacgggacaggtcagcgtggagatagagtgggagctgcagaaggagaacagcaaacgctggaaccccgagatccagtatacttccaactacaacaaatctgttaatgtggactttactgtggacactaatggtgtgtattcagagcctcgccccattggcaccagatacctgactcgtaatctgtaa

SEQ ID NO: 3572 - DNA, 2208 bp, Artificial Sequence
  source: /note="Description of Artificial Sequence: Synthetic polynucleotide"
atggctgccgatggttatcttccagattggctcgaggacactctctctgaaggaataagacagtggtggaagctcaaacctggcccaccaccgccaaagcccgcagagcggcataaggacgacagcaggggtcttgtgcttcctgggtacaagtacctcggacccttcaacggactcgacaagggggagccggtcaacgaggcagacgccgcggccctcgagcacgacaaggcctacgaccggcagctcgacagcggagacaacccgtacctcaagtacaaccacgccgacgcggagtttcaggagcgtcttaaagaagatacgtcttttgggggcaacctcggacgagcagtcttccaggcgaaaaagagggttcttgaacctctgggcctggttgaggaacctgttaagacggctccgggaaaaaagaggccggtagagcactctcctgtggagccagactcctcctcgggaaccggaaaggcgggccagcagcctgcaagaaaaagattgaatttcggtcagactggagacgcagactccgtacctgacccccagcctctcggacagccaccagcagccccctctggtctgggaactaatacgatggctacaggcagtggcgcaccaatggcagacaataacgagggcgccgacggagtgggtaattcctcgggaaattggcattgcgattccacatggatgggcgacagagtcatcaccaccagcacccgcacctgggctctgcccacctacaacaaccatctgtacaagcaaatttccagccaatcaggagcatcgaacgacaaccactactttggctacaacaccccctgggggtattttgacttcaacagattccactgccacttttcgccacgtgactggcaaagactcatcaacaacaactggggattccggcccaagagactcagcttcaagctctttaacattcaagtcaaggaggtcacgcagaatgacggtacgacgacgattgccaataaccttaccagcacggttcaggtctttactgactcggagtaccagctcccgtacgtcctcggctcggcgcatcaaggatgcctcccgccgttcccagcagacgtcttcatggtgccacagtatggatacctcaccctgaacaacgggagtcaggcggtaggacgctcttcattttactgcctggagtacttcccttctcagatgcttcgcacgggaaacaactttaccttcagctacacctttgaggacgtgccttttcacagcagctacgctcacagccaaagtctggaccgtctcatgaatcctctcatcgaccaatacctgtattacttgagcaaaacaaacgctccaagcggaaccaccacgatgtccaggcttcagttttctcaggccggagcgagtgacattcgggaccagtctagaaactggcttcctggaccctgttaccgccagcagcgagtatcaaagacagctgcggacaacaacaacagtgattactcgtggactggagctaccaagtaccacctcaatggaagagactctctggtgaacccgggcccagctatggccagccacaaggatgatgaagaaaaatattttcctcagagcggggttctcatcttcgggaaacaaggctcaaataaaactaatgtggacattgaaaaggttatgattacagacgaagaggaaatcaggaccaccaatcccgtggctacggagcagtatggttctgtatctaccaaccttcaaagcggcaacacacaagcagctacctcagatgtcaacacacaaggcgttcttcctggcatggtctggcaggacagagatgtgtacctgcaggggcccatctgggcaaagattcctcacacggacggacactttcacccttctcccctcatgggcggatttggattgaagcaccctcccccacagattctcatcaagaataccccggtacctgcgaatccttcgaccaccttcagtgcggcaaagtttgcttccttcatcacacagtattccacgggacaggtcagcgtggagatagagtgggagctgcagaaggagaacagcaaacgctggaaccccgagatccagtatacttccaactacaacaaatctgttaatgtggactttactgtggacactaatggtgtgtattcagagcctcgccccattggcaccagatacctgactcgtaatctgtaa

SEQ ID NO: 3573 - DNA, 2208 bp, Artificial Sequence
  source: /note="Description of Artificial Sequence: Synthetic polynucleotide"
atggctgccgatggttatcttccagattggctcgaggacactctctctgaaggaataagacagtggtggaagctcaaacctggcccaccaccgccaaagcccgcagagcggcataaggacgacagcaggggtcttgtgcttcctgggtacaagtacctcggacccttcaacggactcgacaagggggagccggtcaacgaggcagacgccgcggccctcgagcacgacaaggcctacgaccggcagctcgacagcggagacaacccgtacctcaagtacaaccacgccgacgcggagtttcaggagcgtcttaaagaagatacgtcttttgggggcaacctcggacgagcagtcttccaggcgaaaaagagggttcttgaacctctgggcctggttgaggaacctgttaagacggctccgggaaaaaagaggccggtagagcactctcctgtggagccagactcctcctcgggaaccggaaaggcgggccagcagcctgcaagaaaaagattgaatttcggtcagactggaggcgcagactccgtacctgacccccagcctctcggacagccaccagcagccccctctggtctgggaactaatacgatggctacaggcagtggcgcaccaatggcagacaataacgagggcgccgacggagtgggtaattcctcgggaaattggcattgcgattccacatggatgggcgacagagtcatcaccaccagcacccgcacctgggctctgcccacctacaacaaccatctgtacaagcaaatttccagccaatcaggagcatcgaacgacaaccactactttggctacagcaccccctgggggtattttgacttcaacagattccactgccacttttcgccacgtgactggcaaagactcatcaacaacaactggggattccggcccaagagactcagcttcaagctctttaacattcaagtcaaggaggtcacgcagaatgacggtacgacgacgattgccaataaccttaccagcacggttcaggtctttactgactcggagtaccagctcccgtacgtcctcggctcggcgcatcaaggatgcctcccgccgttcccagcagacgtcttcatggtgccacagtatggatacctcaccctgaacaacgggagtcaggcggtaggacgctcttcattttactgcctggagtacttcccttctcagatgcttcgcacgggaaacaactttaccttcagctacacctttgaggacgtgccttttcacagcagctacgctcacagccaaagtctggaccgtctcatgaatcctctcatcgaccaatacctgtattacttgagcaaaacaaacgctccaagcggaaccaccacgatgtccaggcttcagttttctcaggccggagcgagtgacattcgggaccagtctagaaactggcttcctggaccctgttaccgccagcagcgagtatcaaagacagctgcggacaacaacaacagtgattactcgtggactggagctaccaagtaccacctcaatggaagagactctctggtgaacccgggcccagctatggccagccacaaggatgatgaagaaaaatattttcctcagagcggggttctcatcttcgggaaacaaggctcaaataaaactaatgtggacattgaaaaggttatgattacagacgaagaggaaatcaggaccaccaatcccgtggctacggagcagtatggttctgtatctaccaaccttcaaagcggcaacacacaagcagctacctcagatgtcaacacacaaggcgttcttcctggcatggtctggcaggacagagatgtgtacctgcaggggcccatctgggcaaagattcctcacacggacggacactttcacccttctcccctcatgggcggatttggattgaagcaccctcccccacagattctcatcaagaataccccggtacctgcgaatccttcgaccaccttcagtgcggcaaagtttgcttccttcatcacacagtattccacgggacaggtcagcgtggagatagagtgggagctgcagaaggagaacagcaaacgctggaaccccgagatccagtatacttccaactacaacaaatctgttaatgtggactttactgtggacactaatggtgtgtattcagagcctcgccccattggcaccagatacctgactcgtaatctgtaa

SEQ ID NO: 3574 - DNA, 2208 bp, Artificial Sequence
  source: /note="Description of Artificial Sequence: Synthetic polynucleotide"
atggctgccgatggttatcttccagattggctcgaggacactctctctgaaggaataagacagtggtggaagctcaaacccggcccaccaccaccaaggcccgcagagcggcatcaggacgacagcaggggtcttgtgcttcctgggtacaagtacctcggacccttcaacggactcgacaaaggagagccggtcaacgaggcagacgctgcggccctcgagcacgacaaggcctacgaccggcagctcgacagcggagacaacccgtacctcaagtacaaccacgccgacgcggagtttcaggagcgtcttaaagaagatacgtcttttgggggcaacctcggacgagcagtcttccaggcgaaaaagagggttcttgaacctctgggcctggttgaggaacctgttaagacggctccgggaaaaaagaggccggtagagcactctcctgcggagccagactcctcctcgggaaccggaaaagcgggccagcagcctgcaagaaagagattgaatttcggtcagactggagacgcagactccgtacctgacccccagcctctcggacagccaccagcagcccccacaagtttgggatctactacaatggctacaggcagtggcgcaccaatggcagacaataacgagggtgccgatggagtgggtaattcctcaggaaattggcattgcgattcccaatggctgggcgacagagtcatcaccaccagcacccgaacctgggccctgcccacctacaacaaccacctctacaagcaaatctccagccaatcaggagcatcgaacgacaaccactactttggctacagcaccccttgggggtattttgacttcaacagattccactgtcacttctccccacgtgactggcaaagactcatcaacaacaactggggattccgacccaagagactcaacttcaagctctttaacattcaagtcaaagaggtcacgcagaatgacggtacgacgacgattgccaataaccttaccagcacggttcaggtgtttactgactcggagtaccagctcccgtacgtcctcggctcggcgcatcaaggatgcctcccgccgtttccagcggacgtcttcatggtcccacagtatggatacctcaccctgaacaacgggagtcaggcggtaggacgctcttccctttactgcctggagtactttccttctcagatgctgcgtaccggaaacaactttaccttcagctacacctttgaggacgtgcccttccacagcagctacgctcacagccagagtttggaccggctgatgaatcctctgatcgaccagtatctgtattatctgaacaggacacaatcaaatagtggaactcttcagcagtctaggctactgtttagccaagctggacccaccagcatgtcccttcaagctaaaaactggctgcctggaccttgctacagacagcagcgtctgtcaaagcaggcaaacgacaacaacaacagcaactttccctggactgcggctacaaagtatcatctaaatggtcgggactcgttggttaatccaggaccagctatggccagccacaaagacgatgaagaaaagtttttccccatgcatggaaccctgatatttggtaaacaaggaacaaatgctaacgacgcggatttggaacatgtcatgattacagatgaagaagaaatcaggaccaccaatcccgtggctacagagcagtacggaaacgtgtcaaataatttgcaaaactcaaatactggtccaactacagaaaatgtcaatcaccagggagcgttacctggtatggtgtggcaggatcgagacgtgtacctgcagggacccatttgggccaagattcctcacaccgacggacactttcacccttctccactgatgggaggttttggactcaaacacccgcctcctcaaatcatgatcaaaaacactcctgttccagccaatcctcctacaaacttcagcgcggcaaagtttgcttccttcatcacacagtattccacgggacaggtcagcgtggagatcgagtgggagctgcagaaggagaacagcaaacgctggaaccccgagatccagtacacttccaactacaacaaatctgttaatgtggactttactgtggacgctaatggtgtgtattcagagcctcgccccattggcaccagatacctgactcgtaatctgtaa

SEQ ID NO: 3575 - DNA, 2208 bp, Artificial Sequence
  source: /note="Description of Artificial Sequence: Synthetic polynucleotide"
atggctgccgatggttatcttccagattggctcgaggacactctctctgaaggaataagacagtggtggaagctcaaacctggcccaccaccaccaaggcccgcagagcggcatcaggacgacagcaggggtcttgtgcttcctgggtacaagtacctcggacccttcaacggactcgacaaaggagagccggtcaacgaggcagacgctgcggccctcgagcacgacaaggcctacgaccggcagctcgacagcggagacaacccgtacctcaagtacaaccacgccgacgcggagtttcaggagcgtcttaaagaagatacgtcttttgggggcaacctcggacgagcagtcttccaggcgaaaaagagggttcttgaacctctgggcctggttgaggaacctgttaagacggctccgggaaaaaagaggccggtagagcactctcctgcggagccagactcctcctcgggaaccggaaaagcgggccagcagcctgcaagaaagagattgaatttcggtcagactggagacgcagactccgtacctgacccccagcctctcggacagccaccagcagcccccacaagtttgggatctactacaatggctacaggcagtggcgcaccaatggcagacaataacgagggtgccgatggagtgggtaattcctcaggaaattggcattgcgatccccaatggctgggcgacagagtcatcaccaccagcacccgaacctgggccctgcccacctacaacaaccacctctacaagcaaatctccagccaatcaggagcatcgaacgacaaccactactttggctacagcaccccttgggggtattttgacttcaacagattccactgtcacttctccccacgtgactggcaaagactcatcaacaacaactggggattccgacccaagagactcaacttcaagctctttaacattcaagtcaaagaggtcacgcagaatgacggtacgacgacgattgccaataaccttaccagcacggttcaggtgtttactgactcggagtaccagctcccgtacgtcctcggctcggcgcatcaaggatgcctcccgccgtttccagcggacgtcttcatggtcccacagtatggatacctcaccctgaacaacgggagtcaggcggtaggacgctcttccttttactgcctggagtactttccttctcagatgctgcgtaccggaaacaactttaccttcagctacacctttgaggacgtgcccttccacagcagctacgctcacagccagagtttggaccggctgatgaatcctctgatcgaccagtatctgtattatctgaacaggacacaatcaaatagtggaactcttcagcagtctaggctactgtttagccaagctggacccaccagcatgtcccttcaagctaaaaactggctgcctggaccttgctacagacagcagcgtctgtcaaagcaggcaaacgacaacaacaacagcaactttccctggactgcggctacaaagtatcatctaaatggtcgggactcgttggttaatccaggaccagctatggccagccacaaagacgatgaagaaaagtttttccccatgcatggaaccctgatatttggtaaacaaggaacaaatgctaacgacgcggatttggaacatgtcatgattacagatgaagaagaaatcaggaccaccaatcccgtggctacagagcagtacggaaacgtgtcaaataatttgcaaaactcaaatactggtccaactacagaaaatgtcaatcaccagggagcgttacctggtatggtgtggcaggatcgagacgtgtacctgcagggacccatttgggccaagattcctcacaccgacggacactttcacccttctccactgatgggaggttttggactcaaacacccgcctcctcaaatcatgatcaaaaacactcctgttccagccaatcctcctacaaacttcagcgcggcaaagtttgcttccttcatcacacagtattccacgggacaggtcagcgtggagatcgagtgggagctgcagaaggagaacagcaaacgctggaaccccgagatccagtacacttccaactacaacaaatctgttaatgtggactttactgtggacgctaatggtgtgtattcagagcctcgccccattggcaccagatacctgactcgtaatctgtaa

SEQ ID NO: 3576 - DNA, 2208 bp, Artificial Sequence
  source: /note="Description of Artificial Sequence: Synthetic polynucleotide"
atggctgccgatggttatcttccagattggctcgaggacactctctctgaaggaataagacagtggtggaagctcaaacctggcccaccaccaccaaggcccgcagagcggcatcaggacgacagcaggggtcttgtgcttcctgggtacaagtacctcggacccttcaacggactcgacaaaggagagccggtcaacgaggcagacgctgcggccctcgagcacgacaaggcctacgaccggcagctcgacagcggagacaacccgtacctcaagtacaaccacgccgacgcggagtttcaggagcgtcttaaagaagatacgtcttttgggggcaacctcggacgagcagtctcccaggcgaaaaagagggttcttgaacctctgggcctggttgaggaacctgttaagacggctccgggaaaaaagaggccggtagagcactctcctgcggagccagactcctcctcgggaaccggaaaagcgggccagcagcctgcaagaaagagattgaatttcggtcagactggagacgcagactccgtacctgacccccagcctctcggacagccaccagcagcccccacaagtttgggatctactacaatggctacaggcagtggcgcaccaatggcagacaataacgagggtgccgatggagtgggtaattcctcaggaaattggcattgcgattcccaatggctgggcgacagagtcatcaccaccagcacccgaacctgggccctgcccacctacaacaaccacctctacaagcaaatctccagccaatcaggagcatcgaacgacaaccactactttggctacagcaccccttgggggtattttgacttcaacagattccactgtcacttctccccacgtgactggcaaagactcatcaacaacaactggggattccgacccaagagactcaacttcaagctctttaacattcaagtcaaagaggtcacgcagaatgacggtacgacgacgattgccaataaccttaccagcacggttcaggtgtttactgactcggagtaccagctcccgtacgtcctcggctcggcgcatcaaggatgcctcccgccgtttccagcggacgtcttcatggtcccacagtatggatacctcaccctgaacaacgggagtcaggcggtaggacgctcttccttttactgcctggagtactttccttctcagatgctgcgtaccggaaacaactttaccttcagctacacctttgaggacgtgcccttccacagcagctacgctcacagccagagtttggaccggctgatgaatcctctgatcgaccagtatctgtattatctgaacaggacacaatcaaatagtggaactcttcagcagtctaggctactgtttagccaagctggacccaccagcatgtcccttcaagctaaaaactggctgcctggaccttgctacagacagcagcgtctgtcaaagcaggcaaacgacaacaacaacagcaactttccctggactgcggctacaaagtatcatctaaatggtcgggactcgttggttaatccaggaccagctatggccagccacaaagacgatgaagaaaagtttttccccatgcatggaaccctgatatttggtaaacaaggaacaaatgctaacgacgcggatttggaacatgtcatgattacagatgaagaagaaatcaggaccaccaatcccgtggctacagagcagtacggaaacgtgtcaaataatttgcaaaactcaaatactggtccaactacagaaaatgtcaatcaccagggagcgttacctggtatggtgtggcaggatcgagacgtgtacctgcagggacccatttgggccaagattcctcacaccgacggacactttcacccttctccactgatgggaggttttggactcaaacacccgcctcctcaaatcatgatcaaaaacactcctgttccagccaatcctcctacaaacttcagcgcggcaaagtttgcttccttcatcacacagtattccacgggacaggtcagcgtggagatcgagtgggagctgcagaaggagaacagcaaacgctggaaccccgagatccagtacacttccaactacaacaaatctgttaatgtggactttactgtggacgctaatggtgtgtattcagagcctcgccccattggcaccagatacctgactcgtaatctgtaa

SEQ ID NO: 3577 - DNA, 2208 bp, Artificial Sequence
  source: /note="Description of Artificial Sequence: Synthetic polynucleotide"
atggctgccgatggttatcttccagattggctcgaggacactctctctgaaggaataagacagtggtggaagctcaaacctggcccaccaccaccaaggcccgcagagcggcatcaggacgacagcaggggtcttgtgcttcctgggtacaagtacctcggacccttcaacggactcgacaaaggagagccggtcaacgaggcagacgctgcggccctcgagcacgacaaggcctacgaccggcagctcgacagcggagacaacccgtacctcaagtacaaccacgccgacgcggagtttcaggagcgtcttaaagaagatacgtcttttgggggcaacctcggacgagcagtcttccaggcgaaaaagagggttcttgaacctctgggcctggttgaggaacctgttaagacggctccgggaaaaaagaggccggtagagcactctcctgcggagccagactcctcctcgggaaccggaaaagcgggccagcagcctgcaagaaagagattgaatttcggtcagactggagacgcagactccgtacctgacccccagcctctcggacagccaccagcagcccccacaagtttgggatctactacaatggctacaggcagtggcgcaccaatggcagacaataacgagggtgccgatggagtgggtaattcctcaggaaattggcattgcgattcccaatggctgggcgacagagtcatcaccaccagcacccgaacctgggccctgcccacctacaacaaccacctctacaagcaaatctccagccaatcaggagcatcgaacgacaaccactactttggctacagcaccccttgggggtattttgacttcaacagattccactgtcacttctccccacgtgactggcaaagactcatcaacaacaactggggattccgacccaagagactcaacttcaagctctttaacattcaagtcaaagaggtcacgcagaatgacggtacgacgacgattgccaataaccttaccagcacggttcaggtgtttactgactcggagtaccagctcccgtacgtcctcggctcggcgcatcaaggatgcctcccgccgtttccagcggacgtcttcatggtcccacagtatggatacctcaccctgaacaacgggagtcaggcggtaggacgctcttccttttactgcctggagtactttccttctcagatgctgcgtaccggaaacaactttaccttcagctacacctttgaggacgtgcccttccacagcagctacgctcacagccagagtttggaccggctgatgagtcctctgatcgaccagtatctgtattatctgaacaggacacaatcaaatagtggaactcttcagcagtctaggctactgtttagccaagctggacccaccagcatgtcccttcaagctaaaaactggctgcctggaccttgctacagacagcagcgtctgtcaaagcaggcaaacgacaacaacaacagcaactttccctggactgcggctacaaagtatcatctaaatggtcgggactcgttggttaatccaggaccagctatggccagccacaaagacgatgaagaaaagtttttccccatgcatggaaccctgatatttggtaaacaaggaacaaatgctaacgacgcggatttggaacatgtcatgattacagatgaagaagaaatcaggaccaccaatcccgtggctacagagcagtacggaaacgtgtcaaataatttgcaaaactcaaatactggtccaactacagaaaatgtcaatcaccagggagcgttacctggtatggtgtggcaggatcgagacgtgtacctgcagggacccatttgggccaagattcctcacaccgacggacactttcacccttctccactgatgggaggttttggactcaaacacccgcctcctcaaatcatgatcaaaaacactcctgttccagccaatcctcctacaaacttcagcgcggcaaagtttgcttccttcatcacacagtattccacgggacaggtcagcgtggagatcgagtgggagctgcagaaggagaacagcaaacgctggaaccccgagatccagtacacttccaactacaacaaatctgttaatgtggactttactgtggacgctaatggtgtgtattcagagcctcgccccattggcaccagatacctgactcgtaatctgtaa

SEQ ID NO: 3578 - DNA, 2208 bp, Artificial Sequence
  source: /note="Description of Artificial Sequence: Synthetic polynucleotide"
atggctgccgatggttatcttccagattggctcgaggacactctctctgaaggaataagacagtggtggaagctcaaacctggcccaccaccaccaaggcccgcagagcggcatcaggacgacagcaggggtcttgtgcttcctgggtacaagtacctcggacccttcaacggactcgacaaaggagagccggtcaacgaggcagacgctgcggccctcgagcacgacaaggcctacgaccggcagctcgacagcggagacaacccgtacctcaagtacaaccacgccgacgcggagtttcaggagcgtcttaaagaagatacgtcttttgggggcaacctcggacgagcagtcttccaggcgaaaaagagggttcttgaacctctgggcctggttgaggaacctgttaagacggctccgggaaaaaagaggccggtagagcactctcctgcggagccagactcctcctcgggaaccggaaaagcgggccagcagcctgcaagaaagagattgaatttcggtcagactggagacgcagactccgtacctgacccccagcctctcggacagccaccagcagcccccacaagtttgggatctactacaatggctacaggcagtggcgcaccaatggcaggcaataacgagggtgccgatggagtgggtaattcctcaggaaattggcattgcgattcccaatggctgggcgacagagtcatcaccaccagcacccgaacctgggccctgcccacctacaacaaccacctctacaagcaaatctccagccaatcaggagcatcgaacgacaaccactactttggctacagcaccccttgggggtattttgacttcaacagattccactgtcacttctccccacgtgactggcaaagactcatcaacaacaactggggattccgacccaagagactcaacttcaagctctttaacattcaagtcaaagaggtcacgcagaatgacggtacgacgacgattgccaataaccttaccagcacggttcaggtgtttactgactcggagtaccagctcccgtacgtcctcggctcggcgcatcaaggatgcctcccgccgtttccagcggacgtcttcatggtcccacagtatggatacctcaccctgaacaacgggagtcaggcggtaggacgctcttccttttactgcctggagtactttccttctcagatgctgcgtaccggaaacaactttaccttcagctacacctttgaggacgtgcccttccacagcagctacgctcacagccagagtttggaccggctgatgaatcctctgatcgaccagtatctgtattatctgaacaggacacaatcaaatagtggaactcttcagcagtctaggctactgtttagccaagctggacccaccagcatgtcccttcaagctaaaaactggctgcctggaccttgctacagacagcagcgtctgtcaaagcaggcaaacgacaacaacaacagcaactttccctggactgcggctacaaagtatcatctaaatggtcgggactcgttggttaatccaggaccagctatggccagccacaaagacgatgaagaaaagtttttccccatgcatggaaccctgatatttggtaaacaaggaacaaatgctaacgacgcggatttggaacatgtcatgattacagatgaagaagaaatcaggaccaccaatcccgtggctacagagcagtacggaaacgtgtcaaataatttgcaaaactcaaatactggtccaactacagaaaatgtcaatcaccagggagcgttacctggtatggtgtggcaggatcgagacgtgtacctgcagggacccatttgggccaagattcctcacaccgacggacactttcacccttctccactgatgggaggttttggactcaaacacccgcctcctcaaatcatgatcaaaaacactcctgttccagccaatcctcctacaaacttcagcgcggcaaagtttgcttccttcatcacacagtattccacgggacaggtcagcgtggagatcgagtgggagctgcagaaggagaacagcaaacgctggaaccccgagatccagtacacttccaactacaacaaatctgttaatgtggactttactgtggacgctaatggtgtgtattcagagcctcgccccattggcaccagatacctgactcgtaatctgtaa

SEQ ID NO: 3579 - DNA, 2208 bp, Artificial Sequence
  source: /note="Description of Artificial Sequence: Synthetic polynucleotide"
atggctgccgatggttatcttccagattggctcgaggacactctctctgaaggaataagacagtggtggaagctcaaacctggcccaccaccaccaaggcccgcagagcggcatcaggacgacagcaggggtcttgtgcttcctgggtacaagtacctcggacccttcaacggactcgacaaaggagagccggtcaacgaggcagacgctgcggccctcgagcacgacaaggcctacgaccggcagctcgacagcggagacaacccgtacctcaagtacaaccacgccgacgcggagtttcaggagcgtcttaaagaagatacgtcttttgggggcaacctcggacgagcagtcttccaggcgaaaaagagggttcttgaacctctgggcctggttgaggaacctgttaagacggctccgggaaaaaagaggccggtagagcactctcctgcggagccagactcctcctcgggaaccggaaaagcgggccagcagcctgcaagaaagagattgaatttcggtcagactggagacgcagactccgtacctgacccccagcctctcggacagccaccagcagcccccacaagtttgggatctactacaatggctacaggcagtggcgcaccaatggcagacagtaacgagggtgccgatggagtgggtaattcctcaggaaattggcattgcgattcccaatggctgggcgacagagtcatcaccaccagcacccgaacctgggccctgcccacctacaacaaccacctctacaagcaaatctccagccaatcaggagcatcgaacgacaaccactactttggctacagcaccccttgggggtattttgacttcaacagattccactgtcacttctccccacgtgactggcaaagactcatcaacaacaactggggattccgacccaagagactcaacttcaagctctttaacattcaagtcaaagaggtcacgcagaatgacggtacgacgacgattgccaataaccttaccagcacggttcaggtgtttactgactcggagtaccagctcccgtacgtcctcggctcggcgcatcaaggatgcctcccgccgtttccagcggacgtcttcatggtcccacagtatggatacctcaccctgaacaacgggagtcaggcggtaggacgctcttccttttactgcctggagtactttccttctcagatgctgcgtaccggaaacaactttaccttcagctacacctttgaggacgtgcccttccacagcagctacgctcacagccagagtttggaccggctgatgaatcctctgatcgaccagtatctgtattatctgaacaggacacaatcaaatagtggaactcttcagcagtctaggctactgtttagccaagctggacccaccagcatgtcccttcaagctaaaaactggctgcctggaccttgctacagacagcagcgtctgtcaaagcaggcaaacgacaacaacaacagcaactttccctggactgcggctacaaagtatcatctaaatggtcgggactcgttggttaatccaggaccagctatggccagccacaaagacgatgaagaaaagtttttccccatgcatggaaccctgatatttggtaaacaaggaacaaatgctaacgacgcggatttggaacatgtcatgattacagatgaagaagaaatcaggaccaccaatcccgtggctacagagcagtacggaaacgtgtcaaataatttgcaaaactcaaatactggtccaactacagaaaatgtcaatcaccagggagcgttacctggtatggtgtggcaggatcgagacgtgtacctgcagggacccatttgggccaagattcctcacaccgacggacactttcacccttctccactgatgggaggttttggactcaaacacccgcctcctcaaatcatgatcaaaaacactcctgttccagccaatcctcctacaaacttcagcgcggcaaagtttgcttccttcatcacacagtattccacgggacaggtcagcgtggagatcgagtgggagctgcagaaggagaacagcaaacgctggaaccccgagatccagtacacttccaactacaacaaatctgttaatgtggactttactgtggacgctaatggtgtgtattcagagcctcgccccattggcaccagatacctgactcgtaatctgtaa

SEQ ID NO: 3580 - DNA, 2208 bp, Artificial Sequence
  source: /note="Description of Artificial Sequence: Synthetic polynucleotide"
atggctgccgatggttatcttccagattggctcgaggacactctctctgaaggaataagacagtggtggaagctcaaacctggcccaccaccaccaaggcccgcagagcggcatcaggacgacagcaggggtcttgtgcttcctgggtacaagtacctcggacccttcaacggactcgacaaaggagagccggtcaacgaggcagacgctgcggccctcgagcacgacaaggcctacgaccggcagctcgacagcggagacaacccgtacctcaagtacaaccacgccgacgcggagtttcaggagcgtcttaaagaagatacgtcttttgggggcaacctcggacgagcagtcttccaggcgaaaaagagggttcttgaacctctgggcctggttgaggaacctgttaagacggctccgggaaaaaagaggccggtagagcactctcctgcggagccagactcctcctcgggaaccggaaaagcgggccagcagcctgcaagaaagagattgaatttcggtcagactggagacgcagactccgtacctgacccccagcctctcggacagccaccagcagcccccacaagtttgggatctactacaatggctacaggcagtggcgcaccaatggcagacaataacgagggtgccgatggagtgggtaattcctcaggaaattggcattgcgattcccaatggctgggcgacagagtcatcaccaccagcacccgaacctgggccctgcccacctacaacaaccaccactacaagcaaatctccagccaatcaggagcatcgaacgacaaccactactttggctacagcaccccttgggggtattttgacttcaacagattccactgtcacttctccccacgtgactggcaaagactcatcaacaacaactggggattccgacccaagagactcaacttcaagctctttaacattcaagtcaaagaggtcacgcagaatgacggtacgacgacgattgccaataaccttaccagcacggttcaggtgtttactgactcggagtaccagctcccgtacgtcctcggctcggcgcatcaaggatgcctcccgccgtttccagcggacgtcttcatggtcccacagtatggatacctcaccctgaacaacgggagtcaggcggtaggacgctcttccttttactgcctggagtactttccttctcagatgctgcgtaccggaaacaactttaccttcagctacacctttgaggacgtgcccttccacagcagctacgctcacagccagagtttggaccggctgatgaatcctctgatcgaccagtatctgtattatctgaacaggacacaatcaaatagtggaactcttcagcagtctaggctactgtttagccaagctggacccaccagcatgtcccttcaagctaaaaactggctgcctggaccttgctacagacagcagcgtctgtcaaagcaggcaaacgacaacaacaacagcaactttccctggactgcggctacaaagtatcatctaaatggtcgggactcgttggttaatccaggaccagctatggccagccacaaagacgatgaagaaaagtttttccccatgcatggaaccctgatatttggtaaacaaggaacaaatgctaacgacgcggatttggaacatgtcatgattacagatgaagaagaaatcaggaccaccaatcccgtggctacagagcagtacggaaacgtgtcaaataatttgcaaaactcaaatactggtccaactacagaaaatgtcaatcaccagggagcgttacctggtatggtgtggcaggatcgagacgtgtacctgcagggacccatttgggccaagattcctcacaccgacggacactttcacccttctccactgatgggaggttttggactcaaacacccgcctcctcaaatcatgatcaaaaacactcctgttccagccaatcctcctacaaacttcagcgcggcaaagtttgcttccttcatcacacagtattccacgggacaggtcagcgtggagatcgagtgggagctgcagaaggagaacagcaaacgctggaaccccgagatccagtacacttccaactacaacaaatctgttaatgtggactttactgtggacgctaatggtgtgtattcagagcctcgccccattggcaccagatacctgactcgtaatctgtaa

SEQ ID NO: 3581 - DNA, 2208 bp, Artificial Sequence
  source: /note="Description of Artificial Sequence: Synthetic polynucleotide"
atggctgccgatggttatcttccagattggctcgaggacactctctctgaaggaataagacagtggtggaagctcaaacctggcccaccaccaccaaggcccgcagagcggcatcaggacgacagcaggggtcttgtgcttcctgggtacaagtacctcggacccttcaacggactcgacaaaggagagccggtcaacgaggcagacgctgcggccctcgagcacgacaaggcctacgaccggcagctcgacagcggagacaacccgtacctcaagtacaaccacgccgacgcggagtttcaggagcgtcttaaagaagatacgtcttttgggggcaacctcggacgagcagtcttccaggcgaaaaagagggttcttgaacctctgggcctggttgaggaacctgtgaagacggctccgggaaaaaagaggccggtagagcactctcctgcggagccagactcctcctcgggaaccggaaaagcgggccagcagcctgcaagaaagagattgaatttcggtcagactggagacgcagactccgtacctgacccccagcctctcggacagccaccagcagcccccacaagtttgggatctactacaatggctacaggcagtggcgcaccaatggcagacaataacgagggtgccgatggagtgggtaattcctcaggaaattggcattgcgattcccaatggctgggcgacagagtcatcaccaccagcacccgaacctgggccctgcccacctacaacaaccacctctacaagcaaatctccagccaatcaggagcatcgaacgacaaccactactttggctacagcaccccttgggggtattttgacttcaacagattccactgtcacttctccccacgtgactggcaaagactcatcaacaacaactggggattccgacccaagagactcaacttcaagctctttaacattcaagtcaaagaggtcacgcagaatgacggtacgacgacgattgccaataaccttaccagcacggttcgggtgtttactgactcggagtaccagctcccgtacgtcctcggctcggcgcatcaaggatgcctcccgccgtttccagcggacgtcttcatggtcccacagtatggatacctcaccctgaacaacgggagtcaggcggtaggacgctcttccttttactgcctggagtactttccttctcagatgctgcgtaccggaaacaactttaccttcagctacacctttgaggacgtgcccttccacagcagctacgctcacagccagagtttggaccggctgatgaatcctctgatcgaccagtatctgtattatctgaacaggacacaatcaaatagtggaactcttcagcagtctaggctactgtttagccaagctggacccaccagcatgtcccttcaagctaaaaactggctgcctggaccttgctacagacagcagcgtctgtcaaagcaggcaaacgacaacaacaacagcaactttccctggactgcggctacaaagtatcatctaaatggtcgggactcgttggttaatccaggaccagctatggccagccacaaagacgatgaagaaaagtttttccccatgcatggaaccctgatatttggtaaacaaggaacaaatgctaacgacgcggatttggaacatgtcatgattacagatgaagaagaaatcaggaccaccaatcccgtggctacagagcagtacggaaacgtgtcaaataatttgcaaaactcaaatactggtccaactacagaaaatgtcaatcaccagggagcgttacctggtatggtgtggcaggatcgagacgtgtacctgcagggacccatttgggccaagattcctcacaccgacggacactttcacccttctccactgatgggaggttttggactcaaacacccgcctcctcaaatcatgatcaaaaacactcctgttccagccaatcctcctacaaacttcagcgcggcaaagtttgcttccttcatcacacagtattccacgggacaggtcagcgtggagatcgagagggagctgcagaaggagaacagcaaacgctggaaccccgagatccagtacacttccaactacaacaagtctgttaatgtggactttactgtggacgctaatggtgtgtattcagagcctcgccccattggcaccagatacctgactcgtaatctgtaa

SEQ ID NO: 3582 - DNA, 2208 bp, Artificial Sequence
  source: /note="Description of Artificial Sequence: Synthetic polynucleotide"
atggctgccgatggttatcttccagattggctcgaggacactctctctgaaggaataagacagtggtggaagctcaaacctggcccaccaccaccaaggcccgcagagcggcatcaggacgacagcaggggtcttgtgcttcctgggtacaagtacctcggacccttcaacggactcgacaaaggagagccggtcaacgaggcagacgctgcggccctcgagcacgacaaggcctacgaccggcagctcgacagcggagacaacccgtacctcaagtacaaccacgccgacgcggagtttcaggagcgtcttaaagaagatacgtcttttgggggcaacctcggacgagcagtcttccaggcgaaaaagagggttcttgaacctctgggcctggttgaggaacctgttaagacggctccgggaaaaaagaggccggtagagcactctcctgcggagccagactcctcctcgggaaccggaaaagcgggccagcagcctgcaagaaagagattgaatttcggtcagactggagacgcagactccgtacctgacccccagcctctcggacagccaccagcagcccccacaagtttgggatctactacaatggctacaggcagtggcgcaccaatggcagacaataacgagggtgccgatggagtgggtaattcctcaggaaattggcattgcgattcccaatggctgggcgacagagtcatcaccaccagcacccgaacctgggccctgcccacctacaacaaccacctctacaagcaaatctccagccaatcaggagcatcgaacgacaaccactactttggctacagcaccccttgggggtattttgacttcaacagattccactgtcacttctccccacgtgactggcaaagactcatcaacaacaactggggattccgacccaagagactcaacttcaagctctttaacattcaagtcaaagaggtcacgcagaatgacggtacgacgacgattgccaataaccttaccagcacggttcaggtgtttactgactcggagtaccagctcccgtacgtcctcggctcggcgcatcaaggatgcctcccgccgtttccagcggacgtcttcatggtcccacagtatggatacctcaccctgaacaacgggagtcaggcggtaggacgctcttccttttactgcctggagtactttccttctcagatgctgcgtaccggaaacaactttaccttcagctacacctttgaggacgtgccctcccacagcagctacgctcacagccagagtttggaccggctgatgaatcctctgatcgaccagtatctgtattatctgaacaggacacaatcaaatagtggaactcttcagcagtctaggctactgtttagccaagctggacccaccagcatgtcccttcaagctaaaaactggctgcctggaccttgctacagacagcagcgtctgtcaaagcaggcaaacgacaacaacaacagcaactttccctggactgcggctacaaagtatcatctaaatggtcgggactcgttggttaatccaggaccagctatggccagccacaaagacgatgaagaaaagttcttccccatgcatggaaccctgatatttggtaaacaaggaacaaatgctaacgacgcggatttggaacatgtcatgattacagatgaagaagaaatcaggaccaccaatcccgtggctacagagcagtacggaaacgtgtcaaataatttgcaaaactcaaatactggtccaactacagaaaatgtcaatcaccagggagcgttacctggtatggtgtggcaggatcgagacgtgtacctgcagggacccatttgggccaagattcctcacaccgacggacactttcacccttctccactgatgggaggttttggactcaaacacccgcctcctcaaatcatgatcaaaaacactcctgttccagccaatcctcctacaaacttcagcgcggcaaagtttgcttccttcatcacacagtattccacgggacaggtcagcgtggagatcgagtgggagctgcagaaggagaacagcaaacgctggaaccccgagatccagtacacttccaactacaacaaatctgttaatgtggactttactgtggacgctaatggtgtgtattcagagcctcgccccattggcaccagatacctgactcgtaatctgtaa

SEQ ID NO: 3583 - DNA, 2208 bp, Artificial Sequence
  source: /note="Description of Artificial Sequence: Synthetic polynucleotide"
atggctgccgatggttatcttccagattggctcgaggacactctctctgaaggaataagacagtggtggaagctcaaacctggcccaccaccaccaaggcccgcagagcggcatcaggacgacagcaggggtcttgtgcttcctgggtacaagtacctcggacccttcaacggactcgacaaaggagagccggtcaacgaggcagacgctgcggccctcgagcacgacaaggcctacgaccggcagctcgacagcggagacaacccgtacctcaagtacaaccacgccgacgcggagtttcaggagcgtcttaaagaagatacgtcttttgggggcaacctcggacgagcagtcttccaggcgaaaaagagggttcttgaacctctgggcctggttgaggaacctgttaagacggctccgggaaaaaagaggccggtagagcactctcctgcggagccagactcctcctcgggaaccggaaaagcgggccagcggcctgcaagaaagagattgaatttcggtcagactggagacgcagactccgtacctgacccccagcctctcggacagccaccagcagcccccacaagtttgggatctactacaatggctacaggcagtggcgcaccaatggcagacaataacgagggtgccgatggagtgggtaattcctcaggaaattggcattgcgattcccaatggctgggcgacagagtcatcaccaccagcacccgaacctgggccctgcccacctacaacaaccacctctacaagcaaatctccagccaatcaggagcatcgaacgacaaccactactttggctacagcaccccttgggggtattttgacttcaacagattccactgtcacttctccccacgtgactggcaaagactcatcaacaacaactggggattccgacccaagagactcaacttcaagctctttaacattcaagtcaaagaggtcacgcagaatgacggtacgacgacgattgccaataaccttaccagcacggttcaggtgtttactgactcggagtaccagctcccgtacgtcctcggctcggcgcatcaaggatgcctcccgccgtttccagcggacgtcttcatggtcccacagtatggatacctcaccctgaacaacgggagtcaggcggtaggacgctcttccttttactgcctggagtactttccttctcagatgctgcgtaccggaaacaactttaccttcagctacacctttgaggacgtgcccttccacagcagctacgctcacagccagagtttggaccggctgatgaatcctctgatcgaccagtatctgtattatctgaacaggacacaatcaaatagtggaactcttcagcagtctaggctactgtttagccaagctggacccaccagcatgtcccttcaagctaaaaactggctgcctggaccttgctacagacagcagcgtctgtcaaagcaggcaaacgacaacaacaacagcaactttccctggactgcggctacaaagtatcatctaaatggtcgggactcgttggttaatccaggaccagctatggccagccacaaagacgatgaagaaaagtttttccccatgcatggaaccctgatatttggtaaacaaggaacaaatgctaacgacgcggatttggaacatgtcatgattacagatgaagaagaaatcaggaccaccaatcccgtggctacagagcagtacggaaacgtgtcaaataatttgcaaaactcaaatactggtccaactacagaaaatgtcaatcaccagggagcgttacctggtatggtgtggcaggatcgagacgtgtacctgcagggacccatttgggccaagattcctcacaccgacggacactttcacccttctccactgatgggaggttttggactcaaacacccgcctcctcaaatcatgatcaaaaacactcctgttccagccaatcctcctacaaacttcagcgcggcaaagtttgcttccttcatcacacagtattccacgggacaggtcagcgtggagatcgagtgggagctgcagaaggagaacagcaaacgctggaaccccgagatccagtacacttccaactacaacaaatctgttaatgtggactttactgtggacgctaatggtgtgtattcagagcctcgccccattggcaccagatacctgactcgtaatctgtaa

SEQ ID NO: 3584 - DNA, 2208 bp, Artificial Sequence
  source: /note="Description of Artificial Sequence: Synthetic polynucleotide"
atggctgccgatggttatcttccagattggctcgaggacactctctctgaaggaataagacagtggtggaagctcaaacctggcccaccaccgccaaagcccgcagagcggcataaggacgacagcaggggtcttgtgcttcctgggtacaagtacctcggacccttcaacggactcgacaaaggagagccggtcaacgaggcagacgccgcggccctcgagcacgacaaggcctacgaccggcagctcgacagcggagacaacccgtacctcaagtacaaccacgccgacgcggagtttcaggagcgccttaaagaagatacgtcttttgggggcaacctcgcaagagcagtattccaggcgaaaaagagggttcttgaacctctgggcctggttgaggagcctgttaagacggctccgggaaaaaagaggccggtagagcactctcctgcggagccagattcctcctccggaactggaaagtcgggccaacagcctgcaagaaagagattgaattttggtcagactggagacgcagactccgtacctgacccccagcctctcggacagccaccagcagccccctctggtctgggaactaatacgatggcttcaggcagtggcgcaccaatggcagacaataacgagggcgccgacggagtgggtaattcctcgggaaattggcattgcgattccacatggatgggcgacagagtcatcaccaccagcacccgcacctgggctctgcccacctacaacaaccatctgtacaagcaaatttccagccagtctggagcagcgaacgacaaccactactttggctacagcaccccttgggggtattttgacttcaacagattccactgccacttctccccacgtgactggcaaagactcatcaacaacaattggggattccggcccaaaagactcaacttcaagctctttaacattcaagtcaaggaggtcacgcagaatgacggtacgacgacgattgccaataaccttaccagcacggttcaggtgtttactgactcggagtaccagctcccgtacgtcctcggctcggcgcatcaaggatgcctcccgccgttcccagcagacgtcttcatggtgccacagtatggatacctcaccctgaacaacgggagtcaggcggtaggacgctcttcattttactgcctggagtactttccttctcagatgctgcgtaccggaaacaactttaccttcagctacacctttgaggacgtgcccttccacagcagctacgctcacagccagagtttggaccggctgatgaatcctctgatcgaccagtatctgtattatctgaacaggacacaatcaaatagtggaactcttcagcagtctaggctactgtttagccaagctggacccaccagcatgtcccttcaagctaaaaactggctgcctggaccttgctacagacagcagcgtctgtcaaagcaggcaaacgacaacaacaacagcaactttccctggactgcggctacaaagtatcatctaaatggtcgggactcgttggttaatccaggaccagctatggccagccacaaagacgatgaagaaaagtttttccccatgcatggaaccctgatatttggtaaacaaggaacaaatgctaacgacgcggatttggaacatgtcatgattacagatgaagaagaaatcaggaccaccaatcccgtggctacagagcagtacggaaacgtgtcaaataatttgcaaaactcaaatactggtccaactacagaaaatgtcaatcaccagggagcgttacctggtatggtgtggcaggatcgagacgtgtacctgcagggacccatttgggccaagattcctcacaccgacggacactttcacccttctccactgatgggaggttttggactcaaacacccgcctcctcaaatcatgatcaaaaacactcctgttccagccaatcctcctacaaacttcagcgcggcaaagtttgcttccttcatcacacagtattccacgggacaggtcagcgtggagatcgagtgggagctgcagaaggagaacagcaaacgctggaaccccgagatccagtacacttccaactacaacaaatctgttaatgtggactttactgtggacgctaatggtgtgtattcagagcctcgccccattggcaccagatacctgactcgtaatctgtaa

SEQ ID NO: 3585 - DNA, 2208 bp, Artificial Sequence
  source: /note="Description of Artificial Sequence: Synthetic polynucleotide"
atggctgccgatggttatcttccagattggctcgaggacactctctctgaaggaataagacagtggtggaagctcaaacctggcccaccaccaccaaggcccgcagagcggcatcaggacgacagcaggggtcttgtgcttcctgggtacaagtacctcggacccttcaacggactcgacaaaggagagccggtcaacgaggcagacgctgcggccctcgagcacgacaaggcctacgaccggcagctcgacagcggagacaacccgtacctcaagtacaaccacgccgacgcggagtttcaggagcgtcttaaagaagatacgtcttttgggggcaacctcggacgagcagtcttccaggcgaaaaagagggttcttgaacctctgggcctggttgaggaacctgttaagacggctccgggaaaaaagaggccggtagagcactctcctgcggagccagactcctcctcgggaaccggaaaagcgggccagcagcctgcaagaaagagattgaatttcggtcagactggagacgcagactccgtacctgacccccggcctctcggacagccaccagcagcccccacaagtttgggatctactacaatggctacaggcagtggcgcaccaatggcagacaataacgagggtgccgatggagtgggtaattcctcaggaaattggcattgcgattcccaatggctgggcgacagagtcatcaccaccagcacccgaacctgggccctgcccacctacaacaaccacctctacaagcaaatctccagccaatcaggagcatcgaacgacaaccactactttggctacagcaccccttgggggtattttgacttcaacagattccactgtcacttctccccacgtgactggcaaagactcatcaacaacaactggggattccgacccaagagactcaacttcaagctctttaacattcaagtcaaagaggtcacgcagaatgacggtacgacgacgattgccaataaccttaccagcacggttcaggtgtttactgactcggagtaccagctcccgtacgtcctcggctcggcgcatcaaggatgcctcccgccgtttccagcggacgtcttcatggtcccacagtatggatacctcaccctgaacaacgggagtcaggcggtaggacgctcttccttttactgcctggagtactttccttctcagatgctgcgtaccggaaacaactttaccttcagctacacctttgaggacgtgcccttccacagcagctacgctcacagccagagtttggaccggctgatgaatcctctgatcgaccagtatctgtattatctgaacaggacacaatcaaatagtggaactcttcagcagtctaggctactgtttagccaagctggacccaccagcatgtcccttcaagctaaaaactggctgcctggaccttgctacagacagcagcgtctgtcaaagcaggcaaacgacaacaacaacagcaactttccctggactgcggctacaaagtatcatctaaatggtcgggactcgttggttaatccaggaccagctatggccagccacaaagacgatgaagaaaagtttttccccatgcatggaaccctgatatttggtaaacaaggaacaaatgctaacgacgcggatttggaacatgtcatgattacagatgaagaagaaatcaggaccaccaatcccgtggctacagagcagtacggaaacgtgtcaaataatttgcaaaactcaaatactggtccaactacagaaaatgtcaatcaccagggagcgttacctggtatggtgtggcaggatcgagacgtgtacctgcagggacccatttgggccaagattcctcacaccgacggacactttcacccttctccactgatgggaggttttggactcaaacacccgcctcctcaaatcatgatcaaaaacactcctgttccagccaatcctcctacaaacttcagcgcggcaaagtttgcttccttcatcacacagtattccacgggacaggtcagcgtggagatcgagtgggagctgcagaaggagaacagcaaacgctggaaccccgagatccagtacacttccaactacaacaaatctgttaatgtggactttactgtggacgctaatggtgtgtattcagagcctcgccccattggcaccagatacctgactcgtaatctgtaa

SEQ ID NO: 3586 - DNA, 2208 bp, Artificial Sequence
  source: /note="Description of Artificial Sequence: Synthetic polynucleotide"
atggctgccgatggttatcttccagattggctcgaggacactctctctgaaggaataagacagtggtggaagctcaaacctggcccaccaccgccaaagcccgcagagcggcataaggacgacagcaggggtcttgtgcttcctgggtacaagtacctcggacccttcaacggactcgacaaaggagagccggtcaacgaggcagacgccgcggccctcgagcacgacaaggcctacgaccggcagctcgacagcggagacaacccgtacctcaagtacaaccacgccgacgcggagtttcaggagcgccttaaagaagatacgtcttttgggggcaacctcgcaagagcagtattccaggcgaaaaagagggttcttgaacctctgggcctggttgaggagcctgttaagacggctccgggaaaaaagaggccggtagagcactctcctgcggagccagattcctcctccggaactggaaagtcgggccaacagcctgcaagaaagagattgaatttcggtcagactggagacgcagactccgtacctgacccccagcctctcggacagccaccagcagcccccacaagtttgggatctactacaatggctacaggcagtggcgcaccaatggcagacaataacgagggtgccgatggagtgggtaattcctcaggaaattggcattgcgattcccaatggctgggcgacagagtcatcaccaccagcacccgaacctgggccctgcccacctacaacaaccacctctacaagcaaatctccagccaatcaggagcatcgaacgacaaccactactttggctacagcaccccttgggggtattttgacttcaacagattccactgtcacttctccccacgtgactggcaaagactcatcaacaacaactggggattccgacccaagagactcaacttcaagctctttaacattcaagtcaaagaggtcacgcagaatgacggtacgacgacgattgccaataaccttaccagcacggttcaggtgtttactgactcggagtaccagctcccgtacgtcctcggctcggcgcatcaaggatgcctcccgccgtttccagcggacgtcttcatggtcccacagtatggatacctcaccctgaacaacgggagtcaggcggtaggacgctcttccttttactgcctggagtactttccttctcagatgctgcgtaccggaaacaactttaccttcagctacacctttgaggacgtgcccttccacagcagctacgctcacagccagagtttggaccggctgatgaatcctctgatcgaccagtatctgtattatctgaacaggacacaatcaaatagtggaactcttcagcagtctaggctactgtttagccaagctggacccaccagcatgtcccttcaagctaaaaactggctgcctggaccttgctacagacagcagcgtctgtcaaagcaggcaaacgacaacaacaacagcaactttccctggactgcggctacaaagtatcatctaaatggtcgggactcgttggttaatccaggaccagctatggccagccacaaagacgatgaagaaaagtttttccccatgcatggaaccctgatatttggtaaacaaggaacaaatgctaacgacgcggatttggaacatgtcatgattacagatgaagaagaaatcaggaccaccaatcccgtggctacagagcagtacggaaacgtgtcaaataatttgcaaaactcaaatactggtccaactacagaaaatgtcaatcaccagggagcgttacctggtatggtgtggcaggatcgagacgtgtacctgcagggacccatttgggccaagattcctcacaccgacggacactttcacccttctccactgatgggaggttttggactcaaacacccgcctcctcaaatcatgatcaaaaacactcctgttccagccaatcctcctacaaacttcagcgcggcaaagtttgcttccttcatcacacagtattccacgggacaggtcagcgtggagatcgagtgggagctgcagaaggagaacagcaaacgctggaaccccgagatccagtacacttccaactacaacaaatctgttaatgtggactttactgtggacgctaatggtgtgtattcagagcctcgccccattggcaccagatacctgactcgtaatctgtaa

SEQ ID NO: 3587 - DNA, 2208 bp, Artificial Sequence
  source: /note="Description of Artificial Sequence: Synthetic polynucleotide"
atggctgccgatggttatcttccagattggctcgaggacactctctctgaaggaataagacagtggtggaagctcaaacctggcccaccaccaccaaggcccgcagagcggcatcaggacgacagcaggggtcttgtgcttcctgggtacaagtacctcggacccttcaacggactcgacaaaggagagccggtcaacgaggcagacgctgcggccctcgagcacgacaaggcctacgaccggcagctcgacagcggagacaacccgtacctcaagtacaaccacgccgacgcggagtttcaggagcgtcttaaagaagatacgtcttttgggggcaacctcggacgagcagtcttccaggcgaaaaagagggttcttgaacctctgggcctggttgaggaacctgttaagacggctccgggaaaaaagaggccggtagagcactctcctgcggagccagactcctcctcgggaaccggaaaagcgggccagcagcctgcaagaaagagattgaatttcggtcagactggagacgcagactccgtacctgacccccagcctctcggacagccaccagcagcccccacaagtttgggatctactacaatggctacaggcagtggcgcaccaatggcagacaataacgagggtgccgatggagtgggtaattcctcaggaaattggcattgcgattcccaatggctgggcgacagagtcatcaccaccagcacccgaacctgggccctgcccacctacaacaaccacctctacaagcaaatctccagccaatcaggagcatcgaacgacaaccactactttggctacagcaccccttgggggtattttgacttcaacagattccactgtcacttctccccacgtgactggcaaagactcatcaacaacaactggggattccgacccaagagactcaacttcaagctctttaacattcaagtcaaagaggtcacgcagaatgacggtacgacgacgattgccaataaccttaccagcacggttcgggtgtttactgactcggagtaccagctcccgtacgtcctcggctcggcgcatcaaggatgcctcccgccgtttccagcggacgtcttcatggtcccacagtatggatacctcaccctgaacaacgggagtcaggcggtaggacgctcttccttttactgcctggagtactttccttctcagatgctgcgtaccggaaacaactttaccttcagctacacctttgaggacgtgcccttccacagcagctacgctcacagccagagtttggaccggctgatgaatcctctgatcgaccagtatctgtattatctgaacaggacacaatcaaatagtggaactcttcagcagtctaggctactgtttagccaagctggacccaccagcatgtcccttcaagctaaaaactggctgcctggaccttgctacagacagcagcgtctgtcaaagcaggcaaacgacaacaacaacagcaactttccctggactgcggctacaaagtatcatctaaatggtcgggactcgttggttaatccaggaccagctatggccagccacaaagacgatgaagaaaagtttttccccatgcatggaaccctgatatttggtaaacaaggaacaaatgctaacgacgcggatttggaacatgtcatgattacagatgaagaagaaatcaggaccaccaatcccgtggctacagagcagtacggaaacgtgtcaaataatttgcaaaactcaaatactggtccaactacagaaaatgtcaatcaccagggagcgttacctggtatggtgtggcaggatcgagacgtgtacctgcagggacccatttgggccaagattcctcacaccgacggacactttcacccttctccactgatgggaggttttggactcaaacacccgcctcctcaaatcatgatcaaaaacactcctgttccagccaatcctcctacaaacttcagcgcggcaaagtttgcttccttcatcacacagtattccacgggacaggtcagcgtggagatcgagagggagctgcagaaggagaacagcaaacgctggaaccccgagatccagtacacttccaactacaacaagtctgttaatgtggactttactgtgggcgctaatggtgtgtattcagagcctcgccccattggcaccagatacctgactcgtaatctgtaa

SEQ ID NO: 3588 - DNA, 2208 bp, Artificial Sequence
  source: /note="Description of Artificial Sequence: Synthetic polynucleotide"
atggctgccgatggttatcttccagattggctcgaggacactctctctgaaggaataagacagtggtggaagctcaaacctggcccaccaccgccaaagcccgcagagcggcataaggacgacagcaggggtcttgtgcttcctgggtacaagtacctcggacccttcaacggactcgacaaaggagagccggtcaacgaggcagacgccgcggccctcgagcacgacaaggcctacgaccggcagctcgacagcggagacaacccgtacctcaagtacaaccacgccgacgcggagtttcaggagcgccttaaagaagatacgtcttttgggggcaacctcgcaagagcagtattccaggcgaaaaagagggttcttgaacctctgggcctggttgaggagcctgttaagacggctccgggaaaaaagaggccggtagagcactctcctgcggagccagattcctcctccggaactggaaagtcgggccaacagcctgcaagaaagagattgaattttggtcagactggagacgcagactccgtacctgacccccagcctctcggacagccaccagcagccccctctggtctgggaactaatacgatggcttcaggcagtggcgcaccaatggcagacaataacgagggcgccgacggagtgggtaattcctcaggaaattggcattgcgattcccaatggctgggcgacagagtcatcaccaccagcacccgaacctgggccctgcccacctacaacaaccacctctacaagcaaatctccagccaatcaggagcatcgaacgacaaccactactttggctacagcaccccttgggggtattttgacttcaacagattccactgtcacttctccccacgtgactggcaaagactcatcaacaacaactggggattccgacccaagagactcaacttcaagctctttaacattcaagtcaaagaggtcacgcagaatgacggtacgacgacgattgccaataaccttaccagcacggttcaggtgtttactgactcggagtaccagctcccgtacgtcctcggctcggcgcatcaaggatgcctcccgccgtttccagcggacgtcttcatggtcccacagtatggatacctcaccctgaacaacgggagtcaggcggtaggacgctcttccttttactgcctggagtactttccttctcagatgctgcgtaccggaaacaactttaccttcagctacacctttgaggacgtgcccttccacagcagctacgctcacagccagagtttggaccggctgatgaatcctctgatcgaccagtatctgtattatctgaacaggacacaatcaaatagtggaactcttcagcagtctaggctactgtttagccaagctggacccaccagcatgtcccttcaagctaaaaactggctgcctggaccttgctacagacagcagcgtctgtcaaagcaggcaaacgacaacaacaacagcaactttccctggactgcggctacaaagtatcatctaaatggtcgggactcgttggttaatccaggaccagctatggccagccacaaagacgatgaagaaaagtttttccccatgcatggaaccctgatatttggtaaacaaggaacaaatgctaacgacgcggatttggaacatgtcatgattacagatgaagaagaaatcaggaccaccaatcccgtggctacagagcagtacggaaacgtgtcaaataatttgcaaaactcaaatactggtccaactacagaaaatgtcaatcaccagggagcgttacctggtatggtgtggcaggatcgagacgtgtacctgcagggacccatttgggccaagattcctcacaccgacggacactttcacccttctccactgatgggaggttttggactcaaacacccgcctcctcaaatcatgatcaaaaacactcctgttccagccaatcctcctacaaacttcagcgcggcaaagtttgcttccttcatcacacagtattccacgggacaggtcagcgtggagatcgagtgggagctgcagaaggagaacagcaaacgctggaaccccgagatccagtacacttccaactacaacaaatctgttaatgtggactttactgtggacgctaatggtgtgtattcagagcctcgccccattggcaccagatacctgactcgtaatctgtaa

SEQ ID NO: 3589 - DNA, 2208 bp, Artificial Sequence
  source: /note="Description of Artificial Sequence: Synthetic polynucleotide"
atggctgccgatggttatcttccagattggctcgaggacactctctctgaaggaataagacagtggtggaagctcaaacctggcccaccaccaccaaggcccgcagagcggcatcaggacgacagcaggggtcttgtgcttcctgggtacaagtacctcggacccttcaacggactcgacaaaggagagccggtcaacgaggcagacgctgcggccctcgagcacgacaaggcctacgaccggcagctcgacagcggagacaacccgtacctcaagtacaaccacgccgacgcggagtttcaggagcgtcttaaagaagatacgtcttttgggggcaacctcggacgagcagtcttccaggcgaaaaagagggttcttgaacctctgggcctggttgaggaacctgttaagacggctccgggaaaaaagaggccggtagagcactctcctgcggagccagactcctcctcgggaaccggaaaagcgggccagcagcctgcaagaaagagattgaatttcggtcagactggagacgcagactccgtacctgacccccagcctctcggacagccaccagcagcccccacaagtttgggatctactacaatggctacaggcagtggcgcaccaatggcagacaataacgagggtgccgatggagtgggtaattcctcaggaaattggcattgcgattcccaatggctgggcgacagagtcatcaccaccagcacccgaacctgggccctgcccacctacaacaaccacctctacaagcaaatctccagccaatcaggagcatcgaacgacaaccactactttggctacagcaccccttgggggtattttgacttcaacagattccactgtcacttctccccacgtgactggcaaagactcatcaacaacaactggggattccgacccaagagactcaacttcaagctctttaacattcaagtcaaagaggtcacgcagaatgacggtacgacgacgattgccaataaccttaccagcacggttcaggtgtttactgactcggagtaccagctcccgtacgtcctcggctcggcgcatcaaggatgcctcccgccgtttccagcggacgtcttcatggtcccacagtatggatacctcaccctgaacaacgggagtcaggcggtaggacgctcttccttttactgcctggagtactttccttctcagatgctgcgtaccggaaacaactttaccttcagctacacctttgaggacgtgcccttccacagcagctacgctcacagccagagtttggaccggctgatgaatcctctgatcgaccagtatctgtattatctgaacaggacacaatcaaatagtggaactcttcagcagtctaggctactgtttagccaagctggacccaccagcatgtcccttcaagctaaaaactggctgcctggaccttgctacagacagcagcgtctgtcaaagcaggcaaacgacaacaacaacagcaactttccctggactgcggctacaaagtatcatctaaatggtcgggactcgttggttaatccaggaccagctatggccagccacaaagacgatgaagaaaagtttttccccatgcatggaaccctgatatttggtaaacaaggaacaaatgctaacgacgcggatttggaacatgtcatgattacagatgaagaagaaatcaggaccaccaatcccgtggctacagagcagtacggaaacgtgtcaaataatttgcaaaactcaaatactggtccaactacagaaaatgtcaatcaccagggagcgttacctggtatggtgtggcaggatcgagacgtgtacctgcagggacccatttgggccaagattcctcacaccgacggacactttcacccttctcctcttatgggaggatttggactgaagcaccctcccccgcagattctcatcaagaataccccggtacctgcgaatccttctaccaccttcagcgcggcaaagtttgcttccttcatcacacagtactccacggggcaggtcagcgtggagatcgagtgggagctgcagaaagagaacagcaaacgctggaaccccgagatccagtatacctccaactacaacaagtctgttaatgtggactttactgtggacactaatggcgtgtattcagagcctcgccccattggcacaagatacctgactcgtaatctgtaa

SEQ ID NO: 3590 - DNA, 2208 bp, Artificial Sequence
  source: /note="Description of Artificial Sequence: Synthetic polynucleotide"
atggctgccgatggttatcttccagattggctcgaggacactctctctgaaggaataagacagtggtggaagctcaaacctggcccaccaccaccaaggcccgcagagcggcatcaggacgacagcaggggtcttgtgcttcctgggtacaagtacctcggacccttcaacggactcgacaaaggagagccggtcaacgaggcagacgctgcggccctcgagcacgacaaggcctacgaccggcagctcgacagcggagacaacccgtacctcaagtacaaccacgccgacgcggagtttcaggagcgtcttaaagaagatacgtcttttgggggcaacctcggacgagcagtcttccaggcgaaaaagagggttcttgaacctctgggcctggttgaggaacctgttaagacggctccgggaaaaaagaggccggtagagcactctcctgcggagccagactcctcctcgggaaccggaaaagcgggccagcagcctgcaagaaagagattgaatttcggtcagactggagacgcagactccgtacctgacccccagcctctcggacagccaccagcagcccccacaagtttgggatctactacaatggctacaggcagtggcgcaccaatggcagacaataacgagggtgccgatggagtgggtaattcctcaggaaattggcattgcgattcccaatggctgggcgacagagtcatcaccaccagcacccgaacctgggccctgcccacctacaacaaccacctctacaagcaaatctccagccaatcaggagcatcgaacgacaaccactactttggctacagcaccccttgggggtattttgacttcaacagattccactgtcacttctccccacgtgactggcaaagactcatcaacaacaactggggattccgacccaagagactcaacttcaagctctttaacattcaagtcaaagaggtcacgcagaatgacggtacgacgacgattgccaataaccttaccagcacggttcaggtgtttactgactcggagtaccagctcccgtacgtcctcggctcggcgcatcaaggatgcctcccgccgtttccagcggacgtcttcatggtcccacagtatggatacctcaccctgaacaacgggagtcaggcggtaggacgctcttccttttactgcctggagtactttccttctcagatgctgcgtaccgggaacaactttaccttcagctacacctttgaggacgtgcccttccacagcagctacgctcacagccagagtttggaccggctgatgaatcctctgatcgaccagtatctgtattatctgaacaggacacaatcaaatagtggaactcttcagcagtctaggctactgtttagccaagctggacccaccagcatgtcccttcaagctaaaaactggctgcctggaccttgctacagacagcagcgtctgtcaaagcaggcaaacgacaacaacaacagcaactttccctggactgcggctacaaagtatcatctaaatggtcgggactcgtcggttaatccaggaccagctatggccagccacaaagacgatgaagaaaagtttttctccatgcatggaaccctgatatttggtaaacaaggaacaaatgctaacgacgcggatttggaacatgtcatgattacagatgaagaagaaatcaggaccaccaatcccgtggctacagagcagtacggaaacgtgtcaaataatttgcaaaactcaaatactggtccaactacagaaaatgtcaatcaccagggagcgttacctggtatggtgtggcaggatcgagacgtgtacctgcagggacccatttgggccaagattcctcacaccgacggacactttcacccttctccactgatgggaggttttggactcaaacacccgcctccccaaatcatgatcaaaaacactcctgttccagccaatcctcctacaaacttcagcgcggcaaagtttgcttccttcatcacacagtattccacgggacaggtcagcgtggagatcgagtgggagctgcagaaggagaacagcaaacgctggaaccccgagatccagtacacttccaactacaacaaatctgttaatgtggactttactgtggacgctaatggtgtgtattcagagcctcgccccattggcaccagatacctgactcgtaatctgtaa

SEQ ID NO: 3591 - DNA, 2208 bp, Artificial Sequence
  source: /note="Description of Artificial Sequence: Synthetic polynucleotide"
atggctgccgatggttatcttccagattggctcgaggacactctctctgaaggaataagacagtggtggaagctcaaacctggcccaccaccaccaaggcccgcagagcggcatcaggacgacagcaggggtcttgtgcttcctgggtacaagtacctcggacccttcaacggactcgacaaaggagagccggtcaacgaggcagacgctgcggccctcgagcacgacaaggcctacgaccggcagctcgacagcggagacaacccgtacctcaagtacaaccacgccgacgcggagtttcaggagcgtcttaaagaagatacgtcttttgggggcaacctcggacgagcagtcttccaggcgaaaaagagggttcttgaacctctgggcctggttgaggaacctgttaagacggctccgggaaaaaagaggccggtagagcactctcctgcggagccagactcctcctcgggaaccggaaaagcgggccagcagcctgcaagaaagagattgaatttcggtcagactggagacgcagactccgtacctgacccccagcctctcggacagccaccagcagcccccacaagtttgggatctactacaatggctacaggcagtggcgcaccaatggcagacaataacgagggtgccgatggagtgggtaattcctcaggaaattggcattgcgattcccaatggctgggcgacagagtcatcaccaccagcacccgaacctgggccctgcccacctacaacaaccacctctacaagcaaatctccagccaatcaggagcatcgaacgacaaccactactttggctacagcaccccttgggggtattttgacttcaacagattccactgtcacttctccccacgtgactggcaaagactcatcaacaacaactggggattccgacccaagagactcaacttcaagctctttaacattcaagtcaaagaggtcacgcagaatgacggtacgacgacgattgccaataaccttaccagcacggttcaggtgtttactgactcggagtaccagctcccgtacgtcctcggctcggcgcatcaaggatgcctcccgccgtttccagcgggcgtcttcatggtcccacagtatggatacctcaccctgaacaacgggagtcaggcggtaggacgctcttccttttactgcctggagtactttccttctcagatgctgcgtaccggaaacaactttaccttcagctacacctttgaggacgtgcccttccacagcagctacgctcacagccagagtttggaccggctgatgaatcctctgatcgaccagtatctgtattatctgaacaggacacaatcaaatagtggaactcttcagcagtctaggctactgtttagccaagctggacccaccagcatgtcccttcaagctaaaaactggctgcctggaccttgctgcagacagcagcgtctgtcaaagcaggcaaacgacaacaacaacagcaactttccctggactgcggctacaaagtatcatctaaatggtcgggactcgttggttaatccaggaccagctatggccagccacaaagacgatgaagaaaagtttttccccatgcatggaaccctgatatttggtaaacaaggaacaaatgctaacgacgcggatttggaacatgtcatgattacagatgaagaagaaatcaggaccaccaatcccgtggctacagagcagtacggaaacgtgtcaaataatttgcaaaactcaaatactggtccaactacagaaaatgtcaatcaccagggagcgttacctggtatggtgtggcaggatcgagacgtgtacctgcagggacccatttgggccaagattcctcacaccgacggacactttcacccttctccactgatgggaggttttggactcaaacacccgcctcctcaaatcatgatcaaaaacactcctgttccagccaatcctcctacaaacttcagcgcggcaaagtttgcttccttcatcacacagtattccacgggacaggtcagcgtggagatcgagtgggagctgcagaaggagaacagcaaacgctggaaccccgagatccagtacacttccaactacaacaaatctgttaatgtggactttactgtggacgctaatggtgtgtattcagagcctcgccccattggcaccagatacctgactcgtaatctgtaa

SEQ ID NO: 3592 - DNA, 2208 bp, Artificial Sequence
  source: /note="Description of Artificial Sequence: Synthetic polynucleotide"
atggctgccgatggttatcttccagattggctcgaggacactctctctgaaggaataagacagtggtggaagctcaaacctggcccaccaccaccaaggcccgcagagcggcatcaggacgacagcaggggtcttgtgcttcctgggtacaagtacctcggacccttcaacggactcgacaaaggagagccggtcaacgaggcagacgctgcggccctcgagcacgacaaggcctacgaccggcagctcgacagcggagacaacccgtacctcaagtacaaccacgccgacgcggagtttcaggagcgtcttaaagaagatacgtcttttgggggcaacctcggacgagcagtcttccaggcgaaaaagagggttcttgaacctctgggcctggttgaggaacctgttaagacggctccgggaaaaaagaggccggtagagcactctcctgcggagccagactcctcctcgggaaccggaaaagcgggccagcagcctgcaagaaagagattgaatttcggccagactggagacgcagactccgtacctgacccccagcctcccggacagccaccagcagcccccacaagtttgggatctactacaatggctacaggcagtggcgcaccaatggcagacaataacgagggtgccgatggagtgggtaattcctcaggaaattggcattgcgattcccaatggctgggcgacagagtcatcaccaccagcacccgaacctgggccctgcccacctacaacaaccacctctacaagcaaatctccagccaatcaggagcatcgaacgacaaccactactttggctacagcaccccttgggggtattttgacttcaacagattccactgtcacttctccccacgtgactggcaaagactcatcaacaacaactggggattccgacccaagagactcaacttcaagctctttaacattcaagtcaaagaggtcacgcagaatgacggtacgacgacgattgccaataaccttaccagcacggttcaggtgtttactgactcggagtaccagctcccgtacgtcctcggctcggcgcatcaaggatgcctcccgccgtttccagcggacgtcttcatggtcccacagtatggatacctcaccctgaacaacgggagtcaggcggtaggacgctcttccttttactgcctggagtactttccttctcagatgctgcgtaccggaaacaactttaccttcagctacacctttgaggacgtgcccttccacagcagctacgctcacagccagagtttggaccggctgatgaatcctctgatcgaccagtatctgtattatctgaacaggacacaatcaaatagtggaactcttcagcagtctaggctactgtttagccaagctggacccaccagcatgtcccttcaagctaaaaactggctgcctggaccttgctacagacagcagcgtctgtcaaagcaggcaaacgacaacaacaacagcaactttccctggactgcggctacaaagtatcatctaaatggtcgggactcgttggttaatccaggaccagctatggccagccacaaagacgatgaagaaaagtttttccccatgcatggaaccctgatatttggtaaacaaggaacaaatgctaacgacgcggatttggaacatgtcatgattacagatgaagaagaaatcaggaccaccaatcccgtggctacagagcagtacggaaacgtgtcaaataatttgcaaaactcaaatactggtccaactacagaaaatgtcaatcaccagggagcgttacctggtatggtgtggcaggatcgagacgtgtacctgcagggacccatttgggccaagattcctcacaccgacggacactttcacccttctccactgatgggaggttttggactcaaacacccgcctcctcaaatcatgatcaaaaacactcctgttccagccaatcctcctacaaacttcagcgcggcaaagtttgcttccttcatcacacagtattccacgggacaggtcagcgtggagatcgagtgggagctgcagaaggagaacagcaaacgctggaaccccgagatccagtacacttccaactacaacaaatctgttaatgtggactttactgtggacgctaatggtgtgtattcagagcctcgccccattggcaccagatacctgactcgtaatctgtaa

SEQ ID NO: 3593 - DNA, 2208 bp, Artificial Sequence
  source: /note="Description of Artificial Sequence: Synthetic polynucleotide"
atggctgccgatggttatcttccagattggctcgaggacactctctctgaaggaataagacagtggtggaagctcaaacctggcccaccaccaccaaggcccgcagagcggcatcaggacgacagcaggggtcttgtgcttcctgggtacaagtacctcggacccttcaacggactcgacaaaggagagccggtcaacgaggcagacgctgcggccctcgagcacgacaaggcctacgaccggcagctcgacagcggagacaacccgtacctcaagtacaaccacgccgacgcggagtttcaggagcgtcttaaagaagatacgtcttttgggggcaacctcggacgagcagtcttccaggcgaaaaagagggttcttgaacctctgggcctggttgaggaacctgttaagacggctccgggaaaaaagaggccggtagagcactctcctgcggagccagactcctcctcgggaaccggaaaagcgggccagcagcctgcaagaaagagattgaatttcggtcagactggagacgcagactccgtacctgacccccagcctctcggacagccaccagcagcccccacaagtttgggatctactacaatggctacaggcagtggcgcaccaatggcagacaataacgagggtgccgatggagtgggtaattcctcaggaaattggcattgcgattcccaatggctgggcgacagagtcatcaccaccagcacccgaacctgggccctgcccacctacaacaaccaccactacaagcaaatctccagccaatcaggagcatcgaacgacaaccactactttggctacagcaccccttgggggtattttgacttcaacagattccactgtcacttctccccacgtgactggcaaagactcatcaacaacaactggggattccgacccaagagactcaacttcaagctctttaacattcaagtcaaagaggtcacgcagaatgacggtacgacgacgattgccaataaccttaccagcacggttcaggtgtttactgactcggagtaccagctcccgtacgtcctcggctcggcgcatcaaggatgcctcccgccgtttccagcggacgtcttcatggtcccacagtatggatacctcaccctgaacaacgggagtcaggcggtaggacgctcttccttttactgcctggagtactttccttctcagatgctgcgtaccggaaacaactttaccttcagctacacctttgaggacgtgcccttccacagcagctacgctcacagccagagtttggaccggctgatgaatcctctgatcgaccagtatctgtattatctgaacaggacacaatcaaatagtggaactcttcagcagtctaggctactgtttagccaagctggacccaccagcatgtcccttcaagctaaaaactggctgcctggaccttgctacagacagcagcgtctgtcaaagcaggcaaacgacaacaacaacagcaactttccctggactgcggctacaaagtatcatctaaatggtcgggactcgttggttaatccaggaccagctatggccagccacaaagacgatgaagaaaagtttttccccatgcatggaaccctgatatttggtaaacaaggaacaaatgctaacgacgcggatttggaacatgtcatgattacagatgaagaagaaatcaggaccaccaatcccgtggctacagagcagtacggaaacgtgtcaaataatttgcaaaactcaaatactggtccaactacagaagatgtcaatcaccagggagcgttacctggtatggtgtggcaggatcgagacgtgtacctgcagggacccatttgggccaagattcctcacaccgacggacactttcacccttctccactgatgggaggttttggactcaaacacccgcctcctcaaatcatgatcaaaaacactcctgttccagccaatcctcctacaaacttcagcgcggcaaagtttgcttccttcatcacacagtattccacgggacaggtcagcgtggagatcgagtgggagctgcagaaggagaacagcaaacgctggaaccccgagatccagtacacttccaactacaacaaatctgttaatgtggactttactgtggacgctaatggtgtgtattcagagcctcgccccattggcaccagatacctgactcgtaatctgtaa

SEQ ID NO: 3594 - DNA, 2208 bp, Artificial Sequence
  source: /note="Description of Artificial Sequence: Synthetic polynucleotide"
atggctgccgatggttatcttccagattggctcgaggacactctctctgaaggaataagacagtggtggaagctcaaacctggcccaccaccaccaaggcccgcagagcggcatcaggacgacagcaggggtcttgtgcttcctgggtacaagtacctcggacccttcaacggactcgacaaaggagagccggtcaacgaggcagacgctgcggccctcgagcacgacaaggcctacgaccggcagctcgacagcggagacaacccgtacctcaagtacaaccacgccgacgcggagtttcaggagcgtcttaaagaagatacgtcttttgggggcaacctcggacgagcagtcttccaggcgaaaaagagggttcttgaacctctgggcctggttgaggaacctgttaagacggctccgggaaaaaagaggccggtagagcactctcctgcggagccagactcctcctcgggaaccggaaaagcgggccagcagcctgcaagaaagagattgaatttcggtcagactggagacgcagactccgtacctgacccccggcctctcggacagccaccagcagcccccacaagtttgggatctactacaatggctacaggcagtggcgcaccaatggcagacaataacgagggtgccgatggagtgggtaattcctcaggaaattggcattgcgattcccaatggctgggcgacagagtcatcaccaccagcacccgaacctgggccctgcccacctacaacaaccacctctacaagcaaatctccagccaatcaggagcatcgaacgacaaccactactttggctacagcaccccttgggggtattttgacttcaacagattccactgtcacttctccccacgtgactggcaaagactcatcaacaacaactggggattccgacccaagagactcaacttcaagctctttaacattcaagtcaaagaggtcacgcagaatgacggtacgacgacgattgccaataaccttaccagcacggttcaggtgtttactgactcggagtaccagctcccgtacgtcctcggctcggcgcatcaaggatgcctcccgccgtttccagcggacgtcttcatggtcccacagtatggatacctcaccctgaacaacgggagtcaggcggtaggacgctcttccttttactgcctggagtactttccttctcagatgctgcgtaccggaaacaactttaccttcagctacacctttgaggacgtgcccttccacagcagctacgctcacagccagagtttggaccggctgatgaatcctctgatcgaccagtatctgtattatctgaacaggacacaatcaaatagtggaactcttcagcagtctaggctactgtttagccaagctggacccaccagcatgtcccttcaagctaaaaactggctgcctggaccttgctacagacagcagcgtctgtcaaagcaggcaaacgacaacaacaacagcaactttccctggactgcggctacaaagtatcatctaaatggtcgggactcgttggttaatccaggaccagctatggccagccacaaagacgatgaagaaaagtttttccccatgcatggaaccctgatatttggtaaacaaggaacaaatgctaacgacgcggatttggaacatgtcatgattacagatgaagaagaaatcaggaccaccgatcccgtggctacagagcagtacggaaacgtgtcaaataatttgcaaaactcaaatactggtccaactacagaaaatgtcaatcaccagggagcgttacctggtatggtgtggcaggatcgagacgtgtacctgcagggacccatttgggccaagattcctcacaccgacggacactttcacccttctccactgatgggaggttttggactcaaacacccgcctcctcaaatcatgatcaaaaacactcctgttccagccaatcctcctacaaacttcagcgcggcaaagtttgcttccttcatcacacagtattccacgggacaggtcagcgtggagatcgagtgggagctgcagaaggagaacagcaaacgctggaaccccgagatccagtacacttccaactacaacaaatctgttaatgtggactttactgtggacgctaatggtgtgtattcagagcctcgccccattggcaccagatacctgactcgtaatctgtaa

SEQ ID NO: 3595 - DNA, 2208 bp, Artificial Sequence
  source: /note="Description of Artificial Sequence: Synthetic polynucleotide"
atggctgccgatggttatcttccagattggctcgaggacactctctctgaaggaataagacagtggtggaagctcaaacctggcccaccaccaccaaggcccgcagagcggcatcaggacgacagcaggggtcttgtgcttcctgggtacaagtacctcggacccttcaacggactcgacaaaggagagccggtcaacgaggcagacgctgcggccctcgagcacgacaaggcctacgaccggcagctcgacagcggagacaacccgtacctcaagtacaaccacgccgacgcggagtttcaggagcgtcttaaagaagatacgtcttttgggggcaacctcggacgagcagtcttccaggcgaaaaagagggttcttgaacctctgggcctggttgaggaacctgttaagacggctccgggaaaaaagaggccggtagagcactctcctgcggagccagactcctcctcgggaaccggaaaagcgggccagcagcctgcaagaaagagattgaatttcggtcagactggagacgcagactccgtacctgacccccagcctctcggacagccaccagcagcccccacaagtttgggatctactacaatggctacaggcagtggcgcaccaatggcagacaataacgagggtgccgatggagtgggtaattcctcaggaaattggcattgcgattcccaatggctgggcgacagagtcatcaccaccagcacccgaacctgggccctgcccacctacaacaaccacctctacaagcaaatctccagccaatcaggagcatcgaacgacaaccactactttggctacagcaccccttgggggtattttgacttcaacagattccactgtcacttctccccacgtgactggcaaagactcatcaacaacaactggggattccgacccaagagactcaacttcaagctctttaacattcaagtcaaagaggtcacgcagaatgacggtacgacgacgattgccaataaccttaccagcacggttcaggtgtttactgactcggagtaccagctcccgtacgtcctcggctcggcgcatcaaggatgcctcccgccgtttccagcggacgtcttcatggtcccacagtatggatacctcaccctgaacaacgggagtcaggcggtaggacgctcttccttttactgcctggagtactttccttctcagatgctgcgtaccggaaacaactttaccttcagctacacctttgaggacgtgcccttccacagcagctacgctcacagccagagtttggaccggctgatgaatcctctgatcgaccagtatctgtattatctgaacaggacacaatcaaatagtggaactcttcagcagtctaggctactgtttagccaagctggacccaccagcatgtcccttcaagctaaaaactggctgcctggaccttgctacagacagcagcgtctgtcaaagcaggcaaacgacaacaacaacagcaactttccctggactgcggctacaaagtatcatctaaatggtcgggactcgttggttaatccaggaccagctatggccagccacaaagacgatgaagaaaagtttttccccatgcatggaaccctgatatttggtaaacaaggaacaaatgctaacgacgcggatttggaacatgtcatgattacagatgaagaagaaatcaggaccaccaatcccgtggctacagagcagtacggaaacgtgtcaaataatttgcaaaactcaaatactggtccaactacaggaaatgtcaatcaccagggagcgttacctggtatggtgtggcaggatcgagacgtgtacctgcagggacccatttgggccaagattcctcacaccgacggacactttcacccttctccactgatgggaggttttggactcaaacacccgcctcctcaaatcatgatcaaaaacactcctgttccagccaatcctcctacaaacttcagcgcggcaaagtttgcttccttcatcacacagtattccacgggacaggtcagcgtggagatcgagtgggagctgcagaaggagaacagcaaacgctggaaccccgagatccagtacacttccaactacaacaaatctgttaatgtggactttactgtggacgctaatggtgtgtattcagagcctcgccccattggcaccagatacctgactcgtaatctgtaa

SEQ ID NO: 3596 - DNA, 2208 bp, Artificial Sequence
  source: /note="Description of Artificial Sequence: Synthetic polynucleotide"
atggctgccgatggttatcttccagattggctcgaggacactctctctgaaggaataagacagtggtggaagctcaaacctggcccaccaccaccaaggcccgcagagcggcatcaggacgacagcaggggtcttgtgcttcctgggtacaagtacctcggacccttcaacggactcgacaaaggagagccggtcaacgaggcagacgctgcggccctcgagcacgacaaggcctacgaccggcagctcgacagcggagacaacccgtacctcaagtacaaccacgccgacgcggagtttcaggagcgtcttaaagaagatacgtcttttgggggcaacctcggacgagcagtcttccaggcgaaaaagagggttcttgaacctctgggcctggttgaggaacctgttaagacggctccgggaaaaaagaggccggtagagcactctcctgcggagccagactcctcctcgggaaccggaaaagcgggccagcagcctgcaagaaagagattgaatttcggtcagactggagacgcagactccgtacctgacccccagcctctcggacagccaccagcagcccccacaagtttgggatctactacaatggctacaggcagtggcgcaccaatggcagacaataacgagggtgccgatggagtgggtaattcctcaggagattggcattgcgattcccaatggctgggcgacagagtcatcaccaccagcacccgaacctgggccctgcccacctacaacaaccacctctacaagcaaatctccagccaatcaggagcatcgaacgacaaccactactttggctacagcaccccttgggggtattttgacttcaacagattccactgtcacttctccccacgtgactggcaaagactcatcaacaacaactggggattccgacccaagagactcaacttcaagctctttaacattcaagtcaaagaggtcacgcagaatgacggtacgacgacgattgccaataaccttaccagcacggttcaggtgtttactgactcggagtaccagctcccgtacgtcctcggctcggcgcatcaaggatgcctcccgccgtttccagcggacgtcttcatggtcccacagtatggatacctcaccctgaacaacgggagtcaggcggtaggacgctcttccttttactgcctggagtactttccttctcagatgctgcgtaccggaaacaactttaccttcagctacacctttgaggacgtgcccttccacagcagctacgctcacagccagagtttggaccggctgatgaatcctctgatcgaccagtatctgtattatctgaacaggacacaatcaaatagtggaactcttcagcagtctaggctactgtttagccaagctggacccaccagcatgtcccttcaagctaaaaactggctgcctggaccttgctacagacagcagcgtctgtcaaagcaggcaaacgacaacaacaacagcaactttccctggactgcggctacaaagtatcatctaaatggtcgggactcgttggttaatccaggaccagctatggccagccacaaagacgatgaagaaaagtttttccccatgcatggaaccctgatatttggtaaacaaggaacaaatgctaacgacgcggatttggaacatgtcatgattacagatgaagaagaaatcaggaccaccaatcccgtggctacagagcagtacggaaacgtgtcaaatagtttgcaaaactcaaatactggtccaactacagaaaatgtcaatcaccagggagcgttacctggtatggtgtggcaggatcgagacgtgtacctgcagggacccatttgggccaagattcctcacaccgacggacactttcacccttctccactgatgggaggttttggactcaaacacccgcctcctcaaatcatgatcaaaaacactcctgttccagccaatcctcctacaaacttcagcgcggcaaagtttgcttccttcatcacacagtattccacgggacaggtcagcgtggagatcgagtgggagctgcagaaggagaacagcaaacgctggaaccccgagatccagtacacttccaactacaacaaatctgttaatgtggactttactgtggacgctaatggtgtgtattcagagcctcgccccattggcaccagatacctgactcgtaatctgtaa

SEQ ID NO: 3597 - DNA, 2208 bp, Artificial Sequence
  source: /note="Description of Artificial Sequence: Synthetic polynucleotide"
atggctgccgatggttatcttccagattggctcgaggacattctctctgaaggaataagacagtggtggaagctcaaacctggcccaccaccaccaaagcccgcagagcggcataaggacgacagcaggggtcttgtgcttcctgggtacaagtacctcggacccttcaacggactcgacaaaggagagccggtcaacgaggcagacgccgcggccctcgagcacgacaaggcctacgaccggcagctcgacagcggagacaacccgtacctcaagtacaaccacgccgacgcggagtttcaggagcgtcttaaagaagatacgtcttttgggggcaacctcggacgagcagtcttccaggcaaaaaagagggttcttgaacctctgggcctggttgaggaacctgttaagacgactccgggaaaaaagaggccggtagagcaatctcctgcggagccagactcctcctcgggaaccggaaaggcgggcaaccagcctgcaagaaagagattgaattttggtcagactggagacgcagactccgtacctgacccccagcctctcggacagccaccagcagccccctctggtctgggatctactacaatggctacaggcagtggcgcaccaatggcagacaataacgagggtgccgatggagtgggtaattcctcaggaaattggcattgcgattcccaatggttgggcgacagagtcatcaccaccagcacccgaacctgggccctgcccacctacaacaatcacctctacaagcaaatctccagccaatcaggagccagcaacgacaaccactactttggctacagcaccccctgggggtattttgacttcaacagattccactgccacttttcaccacgtgactggcaaagactcatcaacaacaactggggattccgacccaaaagactcaacttcaagctctttaacattcaagtcaaagaggtcacgcagaatgacggtacgacgacgattgccaataaccttaccagcacggttcaggtgtttactgactcggagtaccagctcccgtacgtcctcggctcggcgcatcaaggatgcctcccgccgtttccagcggacgtcttcatggtcccacagtatggatacctcaccctgaacaacgggagtcaggcggtaggacgctcttccttttactgcctggagtactttccttctcagatgcttcgtaccggaaacaactttaccttcagttacacctttgaagacgttcctttccacagcagctacgctcacagtcaaagtctggaccggctgatgaatcctctgatagaccagtacctgtattatctaaacaaaacacaatcaaatagtggaactcttcagcagtctcggctactgtttagtcaagctggacccaccagcatgtctcttcaagctaaaaactggctgcctggaccttgctacagacaacagcgtctgtcaaagcaggcaaacgacaacaacaacagcaactttccctggactgcggctacaaagtatcatctaaatggccgggactcgttggttaatccaggaccagctatggccagccacaaagacgatgaagaaaagtttttccccatgcatggaaccctgatatttggtaaacaaggaacaaatgctaacgacgcggatttggacaatgtcatgattacagatgaagaagaaatccgcaccaccaatcccgtggctacggagcagtacgggactgtgtcaaataatttgcaaaactcaaatactggtccaactactggaactgtcaatcaccaaggagcgttacctggtatggtgtggcaggatcgagacgtgtaccttcagggacccatttgggccaagattcctcacaccgatggacactttcatccttctccactgatgggaggttttggactcaaacacccgcctcctcagatcatgatcaaaaacactcccgttccagccaatcctcctacaaacttcagttctgccaagtttgcttctttcatcacacagtattccacggggcaggtcagcgtggagatagagtgggagctgcagaaggagaacagcaaacgctggaaccccgagatccagtatacttccaactacaacaagtctgttaatgtggactttactgtggacactaatggtgtgtattcagagcctcgccccattggcaccagatacctgactcgtaatctgtaa

SEQ ID NO: 3598 - DNA, 2208 bp, Artificial Sequence
  source: /note="Description of Artificial Sequence: Synthetic polynucleotide"
atggctgccgatggttatcttccagattggctcgaggacattctctctgaaggaataagacagtggtggaagctcaaacctggcccaccaccaccaaagcccgcagagcggcataaggacgacagcaggggtcttgtgcttcctgggtacaagtacctcggacccttcaacggactcgacaaaggagagccggtcaacgaggcagacgccgcggccctcgagcacgacaaggcctacgaccggcagctcgacagcggagacaacccgtacctcaagtacaaccacgccgacgcggagtttcaggagcgtcttaaagaagatacgtcttttgggggcaacctcggacgagcagtcttccaggcaaaaaagagggttcttgaacctctgggcctggttgaggaacctgttaagacggctccgggaaaaaagaggccggtagagcaatctcctgcggagccagactcctcctcgggaaccggaaaggcgggcaaccagcctgcaagaaagagattgaattttggtcagactggagacgcagactccgtacctgacccccagcctctcggacagccaccagcagccccctctggtctgggatctactacaatggctacaggcagtggcgcaccaatggcagacaataacgagggtgccgatggagtgggtaattcctcaggaaattggcattgcgattcccaatggttgggcgacagagtcatcaccaccagcacccgaacctgggccctgcccacctacaacaatcacctctacaagcaaatctccagccaatcaggagccagcaacgacaaccactactttggctacagcaccccctgggggtattttgacttcaacagattccactgccacttttcaccacgtgactggcaaagactcatcaacaacaactggggattccgacccaaaagactcaacttcaagctctttaacattcaagtcaaagaggtcacgcagaatgacggtacgacgacgattgccaataaccttaccagcacggttcaggtgtttactgactcggagtaccagctcccgtacgtcctcggctcggcgcatcaaggatgcctcccgccgtttccagcggacgtcttcatggtcccacagtatggatacctcaccctgaacaacgggagtcaggcggtaggacgctcttccttttactgcctggagtactttccttctcagatgcttcgtaccggaaacaactttaccttcagttacacctttgaagacgttcctttccacagcagctacgctcacagtcaaagtctggaccggctgatgaatcctctgatagaccagtacctgtattatctaaacaaaacacaatcaaatagtggaactcttcagcagtctcggctactgtttagtcaagctggacccaccagcatgtctcttcaagctaaaaactggctgcctggaccttgctacagacaacagcgtctgtcaaagcaggcaaacgacaacaacaacagcaactttccctggactgcggctacaaagtatcatctaaatggccgggactcgttggttaatccaggaccagctatggccagccacaaagacgatgaagaaaagtttttccccatgcatggaaccctgatatttggtaaacaaggaacaaatgctaacgacgcggatttggacaatgtcatgattacagatgaagaagaaatccgcaccaccaatcccgtggctacggagcagtacgggactgtgtcaaataatttgcaaaactcaaatactggtccaactactggaactgtcaatcaccaaggagcgttacctggtatggtgtggcaggatcgagacgtgtaccttcagggacccatttgggccaagattcctcacaccgatggacactttcatccttctccactgatgggaggttttggactcaaacacccgcctcctcagatcatgatcaaaaacactcccgttccagccaatcctcctacaaacttcagttctgccaagtttgcttctttcatcacacagtattccacggggcaggtcagcgtggagatagagtgggagctgcagaaggagaacagcaaacgctggaaccccgagatccagtatacttccaactacaacaagtctgttaatgtggactttactgtggacactaatggtgtgtattcagagcctcgccccattggcaccagatacctgactcgtaatctgtaa

SEQ ID NO: 3599 - DNA, 2208 bp, Artificial Sequence
  source: /note="Description of Artificial Sequence: Synthetic polynucleotide"
atggctgccgatggttatcttccagattggctcgaggacattctctctgaaggaataagacagtggtggaagctcaaacctggcccaccaccaccaaagcccgcagagcggcataaggacgacagcaggggtcttgtgcttcctgggtacaagtacctcggacccttcaacggactcgacaaaggagagccggtcaacgaggcagacgccgcggccctcgagcacgacaaggcctacgaccggcagctcgacagcggagacaacccgtacctcaagtacaaccacgccgacgcggagtttcaggagcgtcttaaagaagatacgtcttttgggggcaacctcggacgagcagtcttccaggcaaaaaagagggttcttgaacctctgggcctggttgaggaacctgttaagacggctccgggaaaaaagaggccggtagagcaatctcctgcggagccagactcctcctcgggaaccggaaaggcgggcaaccagcctgcaagaaagagattgaattttggtcagactggagacgcagactccgtacctgacccccagcctctcggacagccaccagcagccccctctggtctgggatctactacaatggctacaggcagtggcgcaccaatggcagacaataacgagggtgccgatggagtgggtaattcctcaggaaattggcattgcgattcccaatggttgggcgacagagtcatcaccaccagcacccgaacctgggccctgcccacctacaacaatcacctctacaagcaaatctccagccaatcaggagccagcaacgacaaccactactttggctacagcaccccctgggggtattttgacttcaacagattccactgccacttttcaccacgtgactggcaaagactcatcaacaacaactggggattccgacccaaaagactcaacttcaagctctttaacattcaagtcaaagaggtcacgcagaatgacggtacgacgacgattgccaataaccttaccagcacggttcaggtgtttactgactcggagtaccagctcccgtacgtcctcggctcggcgcatcaaggatgcctcccgccgtttccagcggacgtcttcatggtcccacagtatggatacctcaccctgaacaacgggagtcaggcggtaggacgctcttccttttactgcctggagtactttccttctcagatgcttcgtaccggaaacaactttaccttcagttacacctttgaagacgttcctttccacagcggctacgctcacagtcaaagtctggaccggctgatgaatcctctgatagaccagtacctgtattatctaaacaaaacacaatcaaatagtggaactcttcagcagtctcggctactgtttagtcaagctggacccaccagcatgtctcttcaagctaaaaactggctgcctggaccttgctacagacaacagcgtctgtcaaagcaggcaaacgacaacaacaacagcaactttccctggactgcggctacaaagtatcatctaaatggccgggactcgttggttaatccaggaccagctatggccagccacaaagacgatgaagaaaagtttttccccatgcatggaaccctgatatttggtaaacaaggaacaaatgctaacgacgcggatttggacaatgtcatgattacagatgaagaagaaatccgcaccaccaatcccgtggctacggagcagtacgggactgtgtcaaataatttgcaaaactcaaatactggtccaactactggaactgtcaatcaccaaggagcgttacctggtatggtgtggcaggatcgagacgtgtaccttcagggacccatttgggccaagattcctcacaccgatggacactttcatccttctccactgatgggaggttttggactcaaacacccgcctcctcagatcatgatcaaaaacactcccgttccagccaatcctcctacaaacttcagttctgccaagtttgcttctttcatcacacagtattccacggggcaggtcagcgtggagatagagtgggagctgcagaaggagaacagcaaacgctggaaccccgagatccagtatacttccaactacaacaagtctgttaatgtggactttactgtggacactaatggtgtgtattcagagcctcgccccattggcaccagatacctgactcgtaatctgtaa

SEQ ID NO: 3600 - DNA, 2205 bp, Artificial Sequence
  source: /note="Description of Artificial Sequence: Synthetic polynucleotide"
atggctgccgatggttatcttccagattggctcgaggacattctctctgaaggaataagacagtggtggaagctcaaacctggcccaccaccaaagcccgcagagcggcataaggacgacagcaggggtcttgtgcttcctgggtacaagtacctcggacccttcaacggactcgacaaaggagagccggtcaacgaggcagacgccgcggccctcgagcacgacaaggcctacgaccggcagctcgacagcggagacaacccgtacctcaagtacaaccacgccgacgcggagtttcaggagcgtcttaaagaagatacgtcttttgggggcaacctcggacgagcagtcttccaggcaaaaaagagggttcttgaacctctgggcctggttgaggaacctgttaagacggctccgggaaaaaagaggccggtagagcaatctcctgcggagccagactcctcctcgggaaccggaaaggcgggcaaccagcctgcaagaaagagattgaattttggtcagactggagacgcagactccgtacctgacccccagcctctcggacagccaccagcagccccctctggtctgggatctactacaatggctacaggcagtggcgcaccaatggcagacaataacgagggtgccgatggagtgggtaattcctcaggaaattggcattgcgattcccaatggttgggcgacagagtcatcaccaccagcacccgaacctgggccctgcccacctacaacaatcacctctacaagcaaatctccagccaatcaggagccagcaacgacaaccactactttggctacagcaccccctgggggtattttgacttcaacagattccactgccacttttcaccacgtgactggcaaagactcatcaacaacaactggggattccgacccaaaagactcaacttcaagctctttaacattcaagtcaaagaggtcacgcagaatgacggtacgacgacgattgccaataaccttaccagcacggttcaggtgtttactgactcggagtaccagctcccgtacgtcctcggctcggcgcatcaaggatgcctcccgccgtttccagcggacgtcttcatggtcccacagtatggatacctcaccctgaacaacgggagtcaggcggtaggacgctcttccttttactgcctggagtactttccttctcagatgcttcgtaccggaaacaactttaccttcagttacacctttgaagacgttcctttccacagcagctacgctcacagtcaaagtctggaccggctgatgaatcctctgatagaccagtacctgtattatctaaacaaaacacaatcaaatagtggaactcttcagcagtctcggctactgtttagtcaagctggacccaccagcatgtctcttcaagctaaaaactggctgcctggaccttgctacagacaacagcgtctgtcaaagcaggcaaacgacaacaacaacagcaactttccctggactgcggctacaaagtatcatctaaatggccgggactcgttggttaatccaggaccagctatggccagccacaaagacgatgaagaaaagtttttccccatgcatggaaccctgatatttggtaaacaaggaacaaatgctaacgacgcggatttggacaatgtcatgattacagatgaagaagaaatccgcaccaccaatcccgtggctacggagcagtacgggactgtgtcaaataatttgcaaaactcaaatactggtccaactactggaactgtcaatcaccaaggagcgttacctggtatggtgtggcaggatcgagacgtgtaccttcagggacccatttgggccaagattcctcacaccgatggacactttcatccttctccactgatgggaggttttggactcaaacacccgcctcctcagatcatgatcaaaaacactcccgttccagccaatcctcctacaaacttcagttctgccaagtttgcttctttcatcacacagtattccacggggcaggtcagcgtggagatagagtgggagctgcagaaggagaacagcaaacgctggaaccccgagatccagtatacttccaactacaacaagtctgttaatgtggactttactgtggacactaatggtgtgtattcagagcctcgccccattggcaccagatacctgactcgtaatctgtaa

SEQ ID NO: 3601 - DNA, 2208 bp, Artificial Sequence
  source: /note="Description of Artificial Sequence: Synthetic polynucleotide"
atggctgccgatggttatcttccagattggctcgaggacactctctctgaaggaataagacagtggtggaagctcaaacctggcccaccaccaccaaggcccgcagagcggcatcaggacgacagcaggggtcttgtgcttcctgggtacaagtacctcggacccttcaacggactcgacaaaggagagccggtcaacgaggcagacgctgcggccctcgagcacgacaaggcctacgaccggcagctcgacagcggagacaacccgtacctcaagtacaaccacgccgacgcggagtttcaggagcgtcttaaagaagatacgtcttttgggggcaacctcggacgagcagtcttccaggcgaaaaagagggttcttgaacctctgggcctggttgaggaacctgttaagacggctccgggaaaaaagaggccggtagagcactctcctgcggagccagactcctcctcgggaaccggaaaagcgggccagcagcctgcaagaaagagattgaatttcggtcagactggagacgcagactccgtacctgacccccagcctctcggacagccaccagcagcccccacaagtttgggatctactacaatggctacaggcagtggcgcaccaatggcagacaataacgagggtgccgatggagtgggtaattcctcaggaaattggcattgcgattcccaatggctgggcgacagagtcatcaccaccagcacccgaacctgggccctgcccacctacaacaaccacctctacaagcaaatctccagccaatcaggagcatcgaacgacaaccactactttggctacagcaccccttgggggtattttgacttcaacagattccactgtcacttctccccacgtgactggcaaagactcatcaacaacaactggggattccgacccaagagactcaacttcaagctctttaacattcaagtcaaagaggtcacgcagaatgacggtacgacgacgattgccaataaccttaccagcacggttcaggtgtttactgactcggagtaccagctcccgtacgtcctcggctcggcgcatcaaggatgcctcccgccgtttccagcggacgtcttcatggtcccacagtatggatacctcaccctgaacaacgggagtcaggcggtaggacactcttcctcttactgcctggagtactttccttctcagatgctgcgtaccggaaacaactttaccttcagctacacctttgaggacgtgcctttccacagcagctacgctcacagccagagtttggaccggctgatgaatcctctgatcgaccagtatctgtattatctgaacaggacacaatcaaatagtggaactcttcagcagtctaggctactgtttagccaagctggacccaccagcatgtctcttcaagctaaaaactggctgcctggaccttgctacagacagcagcgtctgtcaaagcaggcaaacgacaacaacaacagcaactttccctggactgcggctacaaagtatcatctaaatggtcgggactcgttggttaatccaggaccagctatggccagccacaaagacgatgaagaaaagtttttccccatgcatggaaccctgatatttggtaaacaaggaacaaatgctaacgacgcggatttggaacatgtcatgattacagatgaagaagaaatcaggaccaccaatcccgtggctacagagcagtacggaaacgtgtcaaataatttgcaaaactcaaatactggtccaactacagaaaatgtcaatcaccagggagcgttacctggtatggtgtggcaggatcgagacgtgtacctgcagggacccatttgggccaagattcctcacaccgacggacactttcacccttctccactgatgggaggttttggactcaaacacccgcctcctcaaatcatgatcaaaaacactcctgttccagccaatcctcctacaaacttcagcgcggcaaagtttgcttccttcatcacacagtattccacgggacaggtcagcgtggagatcgagtgggagctgcagaaggagaacagcaaacgctggaaccccgagatccagtacacttccaactacaacaaatctgttaatgtggactttactgtagacactaatggtgtgtattcagagcctcgccccattggcaccagatacctgactcgtaatctgtaa

SEQ ID NO: 3602 - DNA, 2208 bp, Artificial Sequence
  source: /note="Description of Artificial Sequence: Synthetic polynucleotide"
atggctgccgatggttatcttccagattggctcgaggacactctctctgaaggaataagacagtggtggaagctcaaacctggcccaccaccaccaaagcccgcagagcggcatcaggacgacagcaggggtcttgtgcttcccgggcacaagtacctcggacccttcaacggactcgacaaaggagagccggtcaacgaggcagacgctgcggccctcgagcacgacaaggcctacgaccggcagctcgacagcggagacaacccgtacctcaagtacaaccacgccgacgcggagtttcaggagcgtcttaaagaagatacgtcttttgggggcaacctcggacgagcagtcttccaggcgaaaaagagggttcttgaacctctgggcctggttgaggaacctgttaagacggctccgggaaaaaagaggccggtagagcactctcctgcggagccagactcctcctcgggaaccggaaaagcgggccagcagcctgcaagaaagagattgaatttcggtcagactggagacgcagactccgtacctgacccccagcctctcggacagccaccagcagcccccacaagtttgggatctactacaatggctacaggcagtggcgcaccaatggcagacaataacgagggtgccgatggagtgggtaattcctcaggaaattggcattgcgattcccaatggctgggcgacagagtcatcaccaccagcacccgaacctgggccctgcccacctacaacaaccacctctataagcaaatctccagccaatcaggagcatcgaacgacaaccactactttggctacagcaccccttgggggtattttgacttcaacagattccactgtcacttctccccacgtgactggcaaagactcatcaacaacaactggggattccgacccaagagactcaacttcaagctctttaacattcaagtcaaagaggtcacgcagaatgacggtacgacgacgattgccaataaccttaccagcacggttcaggtgtttactgactcggagtaccagctcccgtacgtcctcggctcggcgcatcaaggatgcctcccgccgtttccagcggacgtcttcatggtcccacagtatggatacctcaccctgaacaacgggagtcaggcggtaggacgctcttccttttactgcctggagtactttccttctcagatgctgcgtaccggaaacaactttaccttcagctacacctttgaggacgtgcccttccacagcagctacgctcacagccagagtttggaccggctgatgaatcctctgatcgaccagtatctgtattatctgaacaggacacaatcaaatagtggaactcttcagcagtctaggctactgtttagccaagctggacccaccagcatgtcccttcaagctaaaaactggctgcctggaccttgctacagacagcagcgtctgtcaaagcaggcaaacgacaacaacaacagcaactttccctggactgcggctacaaagtatcatctaaatggtcgggactcgttggttaatccaggaccagctatggccagccacaaagacgatgaagaaaagtttttccccatgcatggaaccctgatatttggtaaacaaggaacaaatgctaacgacgcggatttggaacatgtcatgattacagatgaagaagaaatcaggaccaccaatcccgtggctacagagcagtacggaaacgtgtcaaataatttgcaaaactcaaatactggtccaactacagaaaatgtcaatcaccagggagcgttacctggtatggtgtggcaggatcgagacgtgtacctgcagggacccatttgggccaagattcctcacaccgacggacactttcacccttctccactgatgggaggttttggactcaaacacccgcctcctcaaatcatgatcaaaaacactcctgttccagccaatcctcctacaaacttcagcgcggcaaagtttgcttccttcatcacacagtattccacgggacaggtcagcgtggagatcgagtgggagctgcagaaggagaacagcaaacgctggaaccccgagatccagtacacttccaactacaacaaatctgttaatgtggactttactgtggacgctaatggtgtgtattcagagcctcgccccattggcaccagatacctgactcgtaatctgtaa

SEQ ID NO: 3603 - DNA, 2208 bp, Artificial Sequence
  source: /note="Description of Artificial Sequence: Synthetic polynucleotide"
atggctgccgatggttatcttccagattggctcgaggacactctctctgaaggaataagacagtggtggaagctcaaacctggcccaccaccgccaaagcccgcagagcggcataaggacgacagcaggggtcttgtgcttcctgggtacaagtacctcggacccttcaacggactcgacaagggagagccggtcaacgaggcagacgccgcggccctcgagcacgacaaggcctacgaccggcagctcgacagcggagacaacccgtacctcaagtacaaccacgccgacgcggagtttcaggagcgccttaaagaagatacgtcttttgggggcaacctcggacgagcagtcttccaggcgaaaaagagggttcttgaacctctgggcctggttgaggaacctgttaagacggctccgggaaaaaagaggccggtagagcactctcctgcggagccagactcctcctcgggaaccggaaaagcgggccagcagcctgcaagaaagagattgaatttcggtcagactggagacgcagactccgtacctgacccccagcctctcggacagccaccagcagcccccacaagtttgggatctactacaatggctacaggcagtggcgcaccaatggcagacaataacgagggtgccgatggagtgggtaattcctcaggaaattggcattgcgattcccaatggctgggcgacagagtcatcaccaccagcacccgaacctgggccctgcccacctacaacaaccacctctacaagcaaatctccagccaatcaggagcatcgaacgacaaccactactttggctacagcaccccttgggggtattttgacttcaacagattccactgtcacttctccccacgtgactggcaaagactcatcaacaacaactggggattccgacccaagagactcaacttcaagctctttaacattcaagtcaaagaggtcacgcagaatgacggtacgacgacgattgccaataaccttaccagcacggttcaggtgtttactgactcggagtaccagctcccgtacgtcctcggctcggcgcatcaaggatgcctcccgccgtttccagcggacgtcttcatggtcccacagtatggatacctcaccctgaacaacgggagtcaggcggtaggacgctcttccttttactgcctggagtactttccttctcagatgctgcgtaccggaaacaactttaccttcagctacacctttgaggacgtgcccttccacagcagctacgctcacagccagagtttggaccggctgatgaatcctctgatcgaccagtatctgtattatctgaacaggacacaatcaaatagtggaactcttcagcagtctaggctactgtttagccaagctggacccaccagcatgtcccttcaagctaaaaactggctgcctggaccttgctacagacagcagcgtctgtcaaagcaggcaaacgacaacaacaacagcaactttccctggactgcggctacaaagtatcatctaaatggtcgggactcgttggttaatccaggaccagctatggccagccacaaagacgatgaagaaaagtttttccccatgcatggaaccctgatatttggtaaacaaggaacaaatgctaacgacgcggatttggaacatgtcatgattacagatgaagaagaaatcaggaccaccaatcccgtggctacagagcagtacggaaacgtgtcaaataatttgcaaaactcaaatactggtccaactacagaaaatgtcaatcaccagggagcgttacctggtatggtgtggcaggatcgagacgtgtacctgcagggacccatttgggccaagattcctcacaccgacggacactttcacccttctccactgatgggaggttttggactcaaacacccgcctcctcaaatcatgatcaaaaacactcctgttccagccaatcctcctacaaacttcagcgcggcaaagtttgcttccttcatcacacagtattccacgggacaggtcagcgtggagatcgagtgggagctgcagaaggagaacagcaaacgctggaaccccgagatccagtacacttccaactacaacaaatctgttaatgtggactttactgtggacgctaatggtgtgtattcagagcctcgccccattggcaccagatacctgactcgtaatctgtaa

SEQ ID NO: 3604 - DNA, 2208 bp, Artificial Sequence
  source: /note="Description of Artificial Sequence: Synthetic polynucleotide"
atggctgccgatggttatcttccagattggctcgaggacactctctctgaaggaataagacagtggtggaagctcaaacctggcccaccaccaccaaggcccgcagagcggcatcaggacgacagcaggggtcttgtgcttcctgggtacaagtacctcggacccttcaacggactcgacaaaggagagccggtcaacgaggcagacgctgcggccctcgagcacgacaaggcctacgaccggcagctcgacagcggagacaacccgtacctcaagtacaaccacgccgacgcggagtttcaggagcgtcttaaagaagatacgtcttttgggggcaacctcggacgagcagtcttccaggcgaaaaagagggttcttgaacctctgggcctggttgaggaacctgttaagacggctccgggaaaaaagaggccggtagagcactctcctgcggagccagactcctcctcgggaaccggaaaagcgggccagcagcctgcaagaaagagattgaatttcggtcagactggagacgcagactccgtacctgacccccagcctctcggacagccaccagcagcccccacaagtttgggatctactacaatggctacaggcagtggcgcaccaatggcagacaataacgagggtgccgatggagtgggtaattcctcaggaaattggcattgcgattcccaatggctgggcgacagagtcatcaccaccagcacccgaacctgggccctgcccacctacaacaaccacctctacaagcaaatctccagccaatcaggagcatcgaacgacaaccactactttggctacagcaccccttgggggtattttgacttcaacagattccactgtcacttctccccacgtgactggcaaagactcatcaacaacaactggggattccgacccaagagactcaacttcaagctctttaacattcaagtcaaagaggtcacgcagaatgacggtacgacgacgattgccaataaccttaccagcacggttcaggtgtttactgactcggagtaccagctcccgtacgtcctcggctcggcgcatcaaggatgcctcccgccgtttccagcggacgtcttcatggtcccacagtatggatacctcaccctgaacaacgggagtcaggcggtaggacgctcttcctcttactgcctggagtactttccttctcagatgctgcgtaccggaaacaactttaccttcagctacacctttgaggacgtgcccttccacagcagctacgctcacagccagagtttggaccggctgatgaatcctctgatcgaccagtatctgtattatctgaacaggacacaatcaaatagtggaactcttcagcagtctaggctactgtttagccaagctggacccaccagcatgtcccttcaagctaaaaactggctgcctggaccttgctacagacagcagcgtctgtcaaagcaggcaaacgacaacaacaacagcaactttccctggactgcggctacaaagtatcatctaaatggtcgggactcgttggttaatccaggaccagctatggccagccacaaagacgatgaagaaaagtttttccccatgcatggaaccctgatatttggtaaacaaggaacaaatgctaacgacgcggatttggaacatgtcatgattacagatgaagaagaaatcaggaccaccaatcccgtggctacagagcagtacggaaacgtgtcaaataatttgcaaaactcaaatactggtccaactacagaaaatgtcaatcaccagggagcgttacctggtatggtgtggcaggatcgagacgtgtacctgcagggacccatttgggccaagattcctcacaccgacggacactttcacccttctccactgatgggaggttttggactcaaacacccgcctcctcaaatcatgatcaaaaacactcctgttccagccaatcctcctacaaacttcagcgcggcaaagtttgcttccttcatcacacagtattccacgggacaggtcagcgtggagatcgagtgggagctgcagaaggagaacagcaaacgctggaaccccgagatccagtacacttccaactacaacaaatctgttaatgtggactttactgtggacgctaatggtgtgtattcagagcctcgccccattggcaccagatacctgactcgtaatctgtaa

SEQ ID NO: 3605 - DNA, 2208 bp, Artificial Sequence
  source: /note="Description of Artificial Sequence: Synthetic polynucleotide"
atggctgccgatggttatcttccagattggctcgaggacactctctctgaaggaataagacagtggtggaagctcaaacctggcccaccaccaccaaggcccgcagagcggcatcaggacgacagcaggggtcttgtgcttcctgggtacaagtacctcggacccttcaacggactcgacaaaggagagccggtcaacgaggcagacgctgcggccctcgagcacgacaaggcctacgaccggcagctcgacagcggagacaacccgtacctcaagtacaaccacgccgacgcggagtttcaggagcgtcttaaagaagatacgtcttttgggggcaacctcggacgagcagtcttccaggcgaaaaagagggttcttgaacctctgggcctggttgaggaacctgttaagacggctccgggaaaaaagaggccggtagagcactctcctgcggagccagactcctcctcgggaaccggaaaagcgggccagcagcctgcaagaaagagattgaatttcggtcagactggagacgcagactccgtacctgacccccagcctctcggacagccaccagcagcccccacaagtttgggatctactacaatggctacaggcagtggcgcaccaatggcagacaataacgagggtgccgatggagtgggtaattcctcaggaaattggcattgcgattcccaatggctgggcgacagagtcatcaccaccagcacccgaacctgggccctgcccacctacaacaaccacctctacaagcaaatctccagccaatcaggagcatcgaacgacaaccactactttggctacagcaccccttgggggtattttgacttcaacagattccactgtcacttctccccacgtgactggcaaagactcatcaacaacaactggggattccgacccaagagactcaacttcaagctctttaacattcaagtcaaagaggtcacgcagaatgacggtacgacgacgattgccaataaccttaccagcacggttcaggtgtttactgactcggagtaccagctcccgtacgtcctcggctcggcgcatcaaggatgcctcccgccgtttccagcggacgtcttcatggtcccacagtatggatacctcaccctgaacaacgggagtcaggcggtaggacgctcttccttttactgcctggagtactttccttctcagatgctgcgtaccggaaacaactttaccttcagctacacctttgaggacgtgcccttccacagcagctacgctcacagccagagtttggaccggctgatgaatcctctgatcgaccagtatctgtattatccgaacaggacacaatcaaatagtggaactcttcagcagtctaggctactgtttagccaagctggacccaccagcatgtcccttcaagctaaaaactggctgcctggaccttgctacagacagcagcgtctgtcaaagcaggcaaacgacaacaacaacagcaactttccctggactgcggctacaaagtatcatctaaatggtcgggactcgttggttaatccaggaccagctatggccagccacaaagacgatgaagaaaagtttttccccatgcatggaaccctgatatttggtaaacaaggaacaaatgctaacgacgcggatttggaacatgtcatgattacagatgaagaagaaatcaggaccaccaatcccgtggctacagagcagtacggaaacgtgtcaaataatttgcaaaactcaaatactggtccaactacagaaaatgtcaatcaccagggagcgttacctggtatggtgtggcaggatcgagacgtgtacctgcagggacccatttgggccaagattcctcacaccgacggacactttcacccttctccactgatgggaggttttggactcaaacacccgcctcctcaaatcatgatcaaaaacactcctgttccagccaatcctcctacaaacttcagcgcggcaaagtttgcttccttcatcacacagtattccacgggacaggtcagcgtggagatcgagtgggagctgcagaaggagaacagcaaacgctggaaccccgagatccagtacacttccaactacaacaaatctgttaatgtggactttactgtggacgctaatggtgtgtattcagagcctcgccccattggcaccagatacctgactcgtaatctgtaa

SEQ ID NO: 3606 - DNA, 2208 bp, Artificial Sequence
  source: /note="Description of Artificial Sequence: Synthetic polynucleotide"
atggctgccgatggttatcttccagattggctcgaggacactctctctgaaggaataagacagtggtggaagctcaaacctggcccaccaccaccaaggcccgcagagcggcatcaggacgacagcaggggtcttgtgcttcctgggtacaagtacctcggacccttcaacggactcgacaaaggagagccggtcaacgaggcagacgctgcggccctcgagcacgacaaggcctacgaccggcagctcgacagcggagacaacccgtacctcaagtacaaccacgccgacgcggagtttcaggagcgtcttaaagaagatacgtcttttgggggcaacctcggacgagcagtcttccaggcgaaaaagagggttcttgaacctctgggcctggttgaggaacctgttaagacggctccgggaaaaaagaggccggtagagcactctcctgcggagccagactcctcctcgggaaccggaaaagcgggccagcagcctgcaagaaagagattgaatttcggtcagactggagacgcagactccgtacctgacccccagcctctcggacagccaccagcagcccccacaagtttgggatctactacaatggctacaggcagtggcgcaccaatggcagacaataacgagggtgccgatggagtgggtaattcctcaggaaattggcattgcgattcccaatggctgggcgacagagtcatcaccaccagcacccgaacctgggccctgcccacctacaacaaccacctctacaagcaaatctccagccaatcaggagcatcgaacgacaaccactactttggctacagcaccccttgggggtattttgacttcaacagattccactgtcacttctccccacgtgactggcaaagactcatcaacaacaactggggattccgacccaagagactcaacttcaagctctttaacattcaagtcaaagaggtcacgcagaatgacggtacgacgacgattgccaataaccttaccagcacggttcaggtgtttactgactcggagtaccagctcccgtacgtcctcggctcggcgcatcaaggatgcctcccgccgtttccagcggacgtcttcatggtcccacagtatggatacctcaccctgaacaacgggagtcaggcggtaggacgctcttccttttactgcctggagtactttccttctcagatgcttcgtaccggaaacaactttaccttcagttacacctttgaagacgttcctttccacagcagctacgctcacagtcaaagtctggaccggctgatgaatcctcttatcgaccagtacctgtattatctaaacaaaacacaatcaaatagtggaactcttcagcagtctcggctactgtttagtcaagctggacctaccagcatgtctcttcaagctaaaaactggctgcctggaccttgctacagacaacagcgtctgtcaaagcaggcaaacgacaacaacaacagcaactttccctggactgcggctacaaagtatcatctaaatggccgggactcgttggttaatccaggaccagctatggccagccacaaagacgatgaagaaaagtttttccccatgcatggaaccctgatatttggcaaacaagggacaaatgctaacgacgcggatttggacaatgtcatgattacagatgaagaagaaatccgtaccaccaatcccgtggctacggagcagtacgggactgtgtcaaataatttgcaaaactcaaatactggtccaactactggaactgtcaatcaccaaggagcgttacctggtatggtgtggcaggatcgagacgtgtaccttcagggacccatttgggccaagattcctcacaccgatggacactttcacccttctccgctgatgggaggttttggactcaaacacccgcctcctcagatcatgatcaaaaacactcccgttccagccaatcctcccacaaacttcagttctgccaagtttgcttctttcatcacacagtattccacgggacaggttagcgtggagatcgagtgggagctgcagaaggagaacagcaaacgctggaaccccgagatccagtacacttccaactacaacaagtctgttaatgtggactttactgtggacactaatggtgtgtattcagagcctcgccccattggcaccagatacctgactcgtaatctgtaa

SEQ ID NO: 3607 - DNA, 2208 bp, Artificial Sequence
  source: /note="Description of Artificial Sequence: Synthetic polynucleotide"
atggctgccgatggttatcttccagattggctcgaggacactctctctgaaggaataagacagtggtggaagctcaaacctggcccaccaccaccaaagcccgcagagcggcatcaggacgacagcaggggtcttgtgcttcccgggcacaagtacctcggacccttcaacggactcgacaaaggagagccggtcaacgaggcagacgctgcggccctcgagcacgacaaggcctacgaccggcagctcgacagcggagacaacccgtacctcaagtacaaccacgccgacgcggagtttcaggagcgtcttaaagaagatacgtcttttgggggcaacctcggacgagcagtcttccaggcgaaaaagagggttcttgaacctctgggcctggttgaggaacctgttaagacggctccgggaaaaaagaggccggtagagcactctcctgcggagccagactcctcctcgggaaccggaaaagcgggccagcagcctgcaagaaagagattgaatttcggtcagactggagacgcagactccgtacctgacccccagcctctcggacagccaccagcagcccccacaagtttgggatctactacaatggctacaggcagtggcgcaccaatggcagacaataacgagggtgccgatggagtgggtaattcctcaggaaattggcattgcgattcccaatggctgggcgacagagtcatcaccaccagcacccgaacctgggccctgcccacctacaacaaccacctctataagcaaatctccagccaatcaggagcatcgaacgacaaccactactttggctacagcaccccttgggggtattttgacttcaacagattccactgtcacttctccccacgtgactggcaaagactcatcaacaacaactggggattccgacccaagagactcaacttcaagctctttaacattcaagtcaaagaggtcacgcagaatgacggtacgacgacgattgccaataaccttaccagcacggttcaggtgtttactgactcggagtaccagctcccgtacgtcctcggctcggcgcatcaaggatgcctcccgccgtttccagcggacgtcttcatggtcccacagtatggatacctcaccctgaacaacgggagtcaggcggtaggacactcttcctcttactgcctggagtactttccttctcagatgctgcgtaccggaaacaactttaccttcagctacacctttgaggacgtgcctttccacagcagctacgctcacagccagagtttggaccggctgatgaatcctctgatcgaccagtatctgtattatctgaacaggacacaatcaaatagtggaactcttcagcagtctaggctactgtttagccaagctggacccaccagcatgtctcttcaagctaaaaactggctgcctggaccttgctacagacagcagcgtctgtcaaagcaggcaaacgacaacaacaacagcaactttccctggactgcggctacaaagtatcatctaaatggtcgggactcgttggttaatccaggaccagctatggccagccacaaagacgatgaagaaaagtttttccccatgcatggaaccctgatatttggtaaacaaggaacaaatgctaacgacgcggatttggaacatgtcatgattacagatgaagaagaaatcaggaccaccaatcccgtggctacagagcagtacggaaacgtgtcaaataatttgcaaaactcaaatactggtccaactacagaaaatgtcaatcaccagggagcgttacctggtatggtgtggcaggatcgagacgtgtacctgcagggacccatttgggccaagattcctcacaccgacggacactttcacccttctccactgatgggaggttttggactcaaacacccgcctcctcaaatcatgatcaaaaacactcctgttccagccaatcctcctacaaacttcagcgcggcaaagtttgcttccttcatcacacagtattccacgggacaggtcagcgtggagatcgagtgggagctgcagaaggagaacagcaaacgctggaaccccgagatccagtacacttccaactacaacaaatctgttaatgtggactttactgtagacactaatggtgtgtattcagagcctcgccccattggcaccagatacctgactcgtaatctgtaa

SEQ ID NO: 3608 - DNA, 2208 bp, Artificial Sequence
  source: /note="Description of Artificial Sequence: Synthetic polynucleotide"
atggctgccgatggttatcttccagattggctcgaggacactctctctgaaggaataagacagtggtggaagctcaaacctggcccaccaccaccaaggcccgcagagcggcatcaggacgacagcaggggtcttgtgcttcctgggtacaagtacctcggacccttcaacggactcgacaaaggagagccggtcaacgaggtagacgctgcggccctcgagcacgacaaggcctacgaccggcagctcgacagcggagacaacccgtacctcaagtacaaccacgccgacgcggagtttcaggagcgtcttaaagaagatacgtcttttgggggcaacctcggacgagcagtcttccaggcgaaaaagagggttcttgaacctctgggcctggttgaggaacctgttaagacggctccgggaaaaaagaggccggtagagcactctcctgcggagccagactcctcctcgggaaccggaaaagcgggccagcagcctgcaagaaagagattgaatttcggtcagactggagacgcagactccgtacctgacccccagcctctcggacagccaccagcagcccccacaagtttgggatctactacaatggctacaggcagtggcgcaccaatggcagacaataacgagggtgccgatggagtgggtaattcctcaggaaattggcattgcgattcccaatggctgggcgacagagtcatcaccaccagcacccgaacctgggccctgcccacctacaacaaccacctctacaagcaaatctccagccaatcaggagcatcgaacgacaaccactactttggctacagcaccccttgggggtattttgacttcaacagattccactgtcacttctccccacgtgactggcaaagactcatcaacaacaactggggattccgacccaagagactcaacttcaagctctttaacattcaagtcaaagaggtcacgcagagtgacggtacgacgacgattgccaataaccttaccagcacggttcaggtgtttactgactcggagtaccagctcccgtacgtcctcggctcggcgcatcaaggatgcctcccgccgtttccagcggacgtcttcatggtcccacagtatggatacctcaccctgaacaacgggagtcaggcggtaggacgctcttccttttactgcctggagtactttccttctcagatgctgcgtaccggaaacaactttaccttcagctacacctttgaggacgtgcccttccacagcagctacgctcacagccagagtttggaccggctgatgaatcctctgatcgaccagtatctgtattatctgaacaggacacaatcaaatagtggaactcttcagcagtctaggctactgtttagccaagctggacccaccagcatgtcccttcaagctaaaaactggctgcctggaccttgctacagacagcagcgtctgtcaaagcaggcaaacgacaacaacaacagcaactttccctggactgcggctacaaagtatcatctaaatggtcgggactcgttggttaatccaggaccagctatggccagccacaaagacgatgaagaaaagtttttccccatgcatggaaccctgatatttggtaaacaaggaacaaatgctaacgacgcggatttggaacatgtcatgattacagatgaagaagaaatcaggaccaccaatcccgtggctacagagcagtacggaaacgtgtcaaataatttgcaaaactcaaatactggtccaactacagaaaatgtcaatcaccagggagcgttacctggtatggtgtggcaggatcgagacgtgtacctgcagggacccatttgggccaagattcctcacaccgacggacactttcacccttctccactgatgggaggttttggactcaaacacccgcctcctcaaatcatgatcaaaaacactcctgttccagccaatcctcctacaaacttcagcgcggcaaagtttgcttccttcatcacacagtattccacgggacaggtcagcgtggagatcgagtgggagctgcagaaggagaacagcaaacgctggaaccccgagatccagtacacttccaactacaacaaatctgttaatgtggactttactgtggacgctaatggtgtgtattcagagcctcgccccattggcaccagatacctgactcgtaatctgtaa

SEQ ID NO: 3609 - DNA, 2208 bp, Artificial Sequence
  source: /note="Description of Artificial Sequence: Synthetic polynucleotide"
atggctgccgatggttatcttccagattggctcgaggacactctctctgaaggaataagacagtggtggaagctcaaacctggcccaccaccaccaaggcccgcagagcggcatcaggacgacagcaggggtcttgtgcttcctgggtacaagtacctcggacccttcaacggactcgacaaaggagagccggtcaacgaggcagacgctgcggccctcgagcacgacaaggcctacgaccggcagctcgacagcggagacaacccgtacctcaagtacaaccacgccgacgcggagtttcaggagcgtcttaaagaagatacgtcttttgggggcaacctcggacgagcagtcttccaggcgaaaaagagggttcttgaacctctgggcctggttgaggaacctgttaagacggctccgggaaaaaagaggccggtagagcactctcctgcggagccagactcctcctcgggaaccggaaaagcgggccagcagcctgcaagaaagagattgaatttcggtcagactggagacgcagactccgtacctgacccccagcctctcggacagccaccagcagcccccacaagtttgggatctactacaatggctacaggcagtggcgcaccaatggcagacaataacgagggtgccgatggagtgggtaattcctcaggaaattggcattgcgattcccaatggctgggcgacagagtcatcaccaccagcacccgaacctgggccctgcccacctacaacaaccacctctacaagcaaatctccagccaatcaggagcatcgaacgacaaccactactttggctacagcaccccttgggggtattttgacttcaacagattccactgtcacttctccccacgtgactggcaaagactcatcaacaacaactggggattccgacccaagagactcaacttcaagctctttaacattcaagtcaaagaggtcacgcagaatgacggtacgacgacgattgccaataaccttaccagcacggttcaggtgtttactgactcggagtaccagctcccgtacgtcctcggctcggcgcatcaaggatgcctcccgccgtttccagcggacgtcttcatggtcccacagtatggatacctcaccctgaacaacgggagtcaggcggtaggacgctcttccttttactgcctggagtactttccttctcagatgctgcgtaccggaaacaactttaccttcagctacacctttgaggacgtgcccttccacagcagctacgctcacagccagagtttggaccggctgatgaatcctctgatcgaccagtatctgtattatctgaacaggacacaatcaaatagtggaactcttcagcagtctaggctactgtttagccaagctggacccaccagcatgtcccttcaagctaaaaactggctgcctggaccttgctacagacagcagcgtctgtcaaagcaggcaaacgacaacaacaacagcaactttccctggactgcggctacaaagtatcatctaaatggtcgggactcgttggttaatccaggaccagctatggccagccacaaagacgatgaagaaaagtttttccccatgcatggaaccctgatatttggtaaacaaggaacaaatgctaacgacgcggatttggaacatgtcatgattacagatgaagaagaaatcaggaccaccaatcccgtggctacagagcagtacggaaacgtgtcaaataatttgcaaaactcaaatactggtccaactacagaaaatgtcaatcaccagggagcgttacctggtatggtgtggcaggatcgagacgtgtacctgcagggacccatttgggccaagattcctcacaccgacggacactttcacccttctccactgatgggaggttttggactcaaacacccgcctcctcaaatcatgatcaaaaacactcctgttccagccaatcctcctacaaacttcagcgcggcaaagtttgcttccttcatcacacagtattccacgggacaggtcagcgtggagatcgagtgggagctgcagaaggagaacagcaaacgctggaaccccgagatccagtatacctccaactacaacaagtctgttaatgtggactttactgtggacactaatggcgtgtattcagagcctcgccccattggcacaagatacctgactcgtaatctgtaa

SEQ ID NO: 3610 - DNA, 2208 bp, Artificial Sequence
  source: /note="Description of Artificial Sequence: Synthetic polynucleotide"
atggctgccgatggttatcttccagattggctcgaggacactctctctgaaggaataagacagtggtggaagctcaaacctggcccaccaccaccaaagcccgcagagcggcatcaggacgacagcaggggtcttgtgcttcccgggcacaagtacctcggacccttcaacggactcgacaaaggagagccggtcaacgaggcagacgctgcggccctcgagcacgacaaggcctacgaccggcagctcgacagcggagacaacccgtacctcaagtacaaccacgccgacgcggagtttcaggagcgtcttaaagaagatacgtcttttgggggcaacctcggacgagcagtcttccaggcgaaaaagagggttcttgaacctctgggcctggttgaggaacctgttaagacggctccgggaaaaaagaggccggtagagcactctcctgcggagccagactcctcctcgggaaccggaaaagcgggccagcagcctgcaagaaagagattgaatttcggtcagactggagacgcagactccgtacctgacccccagcctctcggacagccaccagcagcccccacaagtttgggatctactacaatggctacaggcagtggcgcaccaatggcagacaataacgagggtgccgatggagtgggtaattcctcaggaaattggcattgcgattcccaatggctgggcgacagagtcatcaccaccagcacccgaacctgggccctgcccacctacaacaaccacctctataagcaaatctccagccaatcaggagcatcgaacgacaaccactactttggctacagcaccccttgggggtattttgacttcaacagattccactgtcacttctccccacgtgactggcaaagactcatcaacaacaactggggattccgacccaagagactcaacttcaagctctttaacattcaagtcaaagaggtcacgcagaatgacggtacgacgacgattgccaataaccttaccagcacggttcaggtgtttactgactcggagtaccagctcccgtacgtcctcggctcggcgcatcaaggatgcctcccgccgtttccagcggacgtcttcatggtcccacagtatggatacctcaccctgaacaacgggagtcaggcggtaggacactcttcctcttactgcctggagtactttccttctcagatgctgcgtaccggaaacaactttaccttcagctacacctttgaggacgtgcctttccacagcagctacgctcacagccagagtttggaccggctgatgaatcctctgatcgaccagtatctgtattatctgaacaggacacaatcaaatagtggaactcttcagcagtctaggctactgtttagccaagctggacccaccagcatgtctcttcaagctaaaaactggctgcctggaccttgctacagacagcagcgtctgtcaaagcaggcaaacgacaacaacaacagcaactttccctggactgcggctacaaagtatcatctaaatggtcgggactcgttggttaatccaggaccagctatggccagccacaaagacgatgaagaaaagtttttccccatgcatggaaccctgatatttggtaaacaaggaacaaatgctaacgacgcggatttggaacatgtcatgattacagatgaagaagaaatcaggaccaccaatcccgtggctacagagcagtacggaaacgtgtcaaataatttgcaaaactcaaatactggtccaactacagaaaatgtcaatcaccagggagcgttacctggtatggtgtggcaggatcgagacgtgtacctgcagggacccatttgggccaagattcctcacaccgacggacactttcacccttctccactgatgggaggttttggactcaaacacccgcctcctcaaatcatgatcaaaaacactcctgttccagccaatcctcctacaaacttcagcgcggcaaagtttgcttccttcatcacacagtattccacgggacaggtcagcgtggagatcgagtgggagctgcagaaggagaacagcaaacgctggaaccccgagatccagtacacttccaactacaacaaatctgttaatgtggactttactgtggacgctaatggtgtgtattcagagcctcgccccattggcaccagatacctgactcgtaatctgtaa

SEQ ID NO: 3611 - DNA, 2208 bp, Artificial Sequence
  source: /note="Description of Artificial Sequence: Synthetic polynucleotide"
atggctgccgatggttatcttccagattggctcgaggacactctctctgaaggaataagacagtggtggaagctcaaacctggcccaccaccaccaaggcccgcagagcggcatcaggacgacagcaggggtcttgtgcttcctgggtacaagtacctcggacccttcaacggactcgacaaaggagagccggtcaacgaggcagacgctgcggccctcgagcacgacaaggcctacgaccggcagctcgacagcggagacaacccgtacctcaagtacaaccacgccgacgcggagtttcaggagcgtcttaaagaagatacgtcttttgggggcaacctcggacgagcagtcttccaggcgaaaaagagggttcttgaacctctgggcctggttgaggaacctgttaagacggctccgggaaaaaagaggccggtagagcactctcctgcggagccagactcctcctcgggaaccggaaaagcgggccagcagcctgcaagaaagagattgaatttcggtcagactggagacgcagactccgtacctgacccccagcctctcggacagccaccagcagcccccacaagtttgggatctactacaatggctacaggcagtggcgcaccaatggcagacaataacgagggtgccgatggagtgggtaattcctcaggaaattggcattgcgattcccaatggctgggcgacagagtcatcaccaccagcacccgaacctgggccctgcccacctacaacaaccacctctacaagcaaatctccagccaatcaggagcatcgaacgacaaccactactttggctacagcaccccttgggggtattttgacttcaacagattccactgtcacttctccccacgtgactggcaaagactcatcaacaacaactggggattccgacccaagagactcaacttcaagctctttaacattcaagtcaaagaggtcacgcagaatgacggtacgacgacgattgccaataaccttaccagcacggttcaggtgtttactgactcggagtaccagctcccgtacgtcctcggctcggcgcatcaaggatgcctcccgccgtttccagcggacgtcttcatggtcccacagtatggatacctcaccctgaacaacgggagtcaggcggtaggacgctcttccttttactgcctggagtactttccttctcagatgctgcgtaccggaaacaactttaccttcagctacacctttgaggacgtgcccttccacagcagctacgctcacagccagagtttggaccggctgatgaatcctctgatcgaccagtatctgtattatctgaacaggacacaatcaaatagtggaactcttcagcagtctaggctactgtttagccaagctggacccaccagcatgtcccttcaagctaaaaactggctgcctggaccttgctacagacagcagcgtctgtcaaagcaggcaaacgacaacaacaacagcaactttccctggactgcggctacaaagtatcatctaaatggtcgggactcgttggttaatccaggaccagctatggccagccacaaagacgatgaagaaaagtttttccccatgcatggaaccctgatatttggtaaacaaggaacaaatgctaacgacgcggatttggaacatgtcatgattacagatgaagaagaaatcaggaccaccaatcccgtggctacagagcagtacggaaacgtgtcaaataatttgcaaaactcaaatactggtccaactacagaaaatgtcaatcaccagggagcgttacctggtatggtgtggcaggatcgagacgtgtacctgcagggacccatttgggccaagattcctcacaccgacggacactttcacccttctccactgatgggaggttttggactcaaacacccgcctcctcaaatcatgatcaaaaacactcctgttccagccaatcctcctacaaacttcagcgcggcaaagtttgcttccttcatcacacagtattccacgggacaggccagcgtggagatcgagtgggagctgcagaaggagaacagcaaacgctggaaccccgagatccagtacacttccaactacaacaaatctgttaatgtggactttactgtggacgctaatggtgtgtattcagagcctcgccccattggcaccagatacctgactcgtaatctgtaa

SEQ ID NO: 3612 - DNA, 2208 bp, Artificial Sequence
  source: /note="Description of Artificial Sequence: Synthetic polynucleotide"
atggctgccgatggttatcttccagattggctcgaggacactctctctgaaggaataagacagtggtggaagctcaaacctggcccaccaccgccaaagcccgcagggcggcataaggacgacagcaggggtcttgtgcttcctgggtacaagtacctcggacccttcaacggactcgacaagggagagccggtcaacgaggcagacgccgcggccctcgagcacgacaaggcctacgaccggcagctcgacagcggagacaacccgtacctcaagtacaaccacgccggcgcggagtttcaggagcgccttaaagaagatacgtcttttgggggcaacctcggacgagcagtattccaggcgaaaaagagggttcttgaacctctgggcctggttgaggagcctgttaagacggccccgggaaaaaagaggccggtagagcactctcctgtggagccagactcctcctcgggaaccggaaaagcgggccagcagcctgcgaggaagagattgaattttggtcagactggagacgcagactccgtacctgacccccagcctctcggacagccaccagcagcccccacaagtttgggatctactacaatggctacaggcagtggcgcaccaatggcagacaataacgagggtgccgatggagtgggtaattcctcagggaattggcattgcgattcccaatggttgggcgacagagtcatcaccaccagcacccgaacctgggccctgcccacctacaacaaccacctctacaagcaaatctccagccaatcaggagcagcgaacgacaaccactactttggctacagcaccccttgggggtattttgacttcaacagattccactgccacttttcaccacgtgactggcaaagactcatcaacaacaactggggattccgacccaagagactcaacttcaagctctttaacattcaagtcaaagaggtcacgcagaatgacggtacgacgacgattgccaataaccttaccagcacggttcaggtgtttactgactcggagtaccagctcccgtacgtcctcggctcggcgcatcaaggatgcctcccgccgtttccagcggacgtcttcatggtcccacagtatggatacctcaccctgaacaacgggagtcaggcggtaggacgctcttccttttactgcctggagtactttccttctcagatgctgcgtaccggaaacaactttaccttcagctacacctttgaggacgtgcccttccacagcagctacgctcacagccagagtttggaccggctgatgaatcctctgatcgaccagtatctgtattatctgaacaggacacaatcaaatagtggaactcttcagcagtctaggctactgtttagccaagctggacccaccagcatgtcccttcaagctaaaaactggctgcctggaccttgctacagacagcagcgtctgtcaaagcaggcaaacgacaacaacaacagcaactttccctggactgcggctacaaagtatcatctaaatggtcgggactcgttggttaatccaggaccagctatggccagccacaaagacgatgaagaaaagtttttccccatgcatggaaccctgatatttggtaaacaaggaacaaatgctaacgacgcggatttggaacatgtcatgattacagatgaagaagaaatcaggaccaccaatcccgtggctacagagcagtacggaaacgtgtcaaataatttgcaaaactcaaatactggtccaactacagaaaatgtcaatcaccagggagcgttacctggtatggtgtggcaggatcgagacgtgtacctgcagggacccatttgggccaagattcctcacaccgacggacactttcacccttctccactgatgggaggttttggactcaaacacccgcctcctcaaatcatgatcaaaaacactcctgttccagccaatcctcctacaaacttcagcgcggcaaagtttgcttccttcatcacacagtattccacgggacaggtcagcgtggagatcgagtgggagctgcagaaggagaacagcaaacgctggaaccccgagatccagtacacttccaactacaacaaatctgttaatgtggactttactgtggacgctaatggtgtgtattcagagcctcgccccattggcaccagatacctgactcgtaatctgtaa

SEQ ID NO: 3613 - DNA, 2208 bp, Artificial Sequence
  source: /note="Description of Artificial Sequence: Synthetic polynucleotide"
atggctgccgatggttatcttccagattggctcgaggacactctctctgaaggaataagacagtggtggaagctcaaacctggcccaccaccaccaaggcccgcagagcggcatcaggacgacagcaggggtcttgtgcttcctgggtacaagtacctcggacccttcaacggactcgacaaaggagagccggtcaacgaggcagacgctgcggccctcgagcacgacaaggcctacgaccggcagctcgacagcggagacaacccgtacctcaagtacaaccacgccgacgcggagtttcaggagcgtcttaaagaagatacgtcttttgggggcaacctcggacgagcagtcttccaggcgaaaaagagggttcttgaacctctgggcctggttgaggaacctgttaagacggctccgggaaaaaagaggccggtagagcactctcctgcggagccagactcctcctcgggaaccggaaaagcgggccagcagcctgcaagaaagagattgaatttcggtcagactggagacgcagactccgtacctgacccccagcctctcggacagccaccagcagcccccacaagtttgggatctactacaatggctacaggcagtggcgcaccaatggcagacaataacgagggtgccgatggagtgggtaattcctcaggaaattggcattgcgattcccaatggctgggcgacagagtcatcaccaccagcacccgaacctgggccctgcccacctacaacaaccacctctacaagcaaatctccagccaatcaggagcatcgaacgacaaccactactttggctacagcaccccttgggggtattttgacttcaacagattccactgtcacttctccccacgtgactggcaaagactcatcaacaacaactggggattccgacccaagagactcaacttcaagctctttaacattcaagtcaaagaggtcacgcagaatgacggtacgacgacgattgccaataaccttaccagcacggttcaggtgtttactgactcggagtaccagctcccgtacgtcctcggctcggcgcatcaaggatgcctcccgccgtttccagcggacgtcttcatggtcccacagtatggatacctcaccctgaacaacgggagtcaggcggtaggacgctcttccttttactgcctggagtactttccttctcagatgctgcgtaccggaaacaactttaccttcagctacacctttgaggacgtgcccttccacagcagctacgctcacagccagagtttggaccggctgatgaatcctctgatcgaccagtatctgtattatctgaacaggacacaatcaaatagtggaactcttcagcagtctaggctactgtttagccaagctggacccaccagcatgtcccttcaagctaaaaactggctgcctggaccttgctacagacagcagcgtctgtcaaagcaggcaaacgacaacaacaacagcaactttccctggactgcggctacaaagtatcatctaaatggtcgggactcgttggttaatccaggaccagctatggccagccacaaagacgatgaagaaaagtttttccccatgcatggaaccctgatatttggtaaacaaggaacaaatgctaacgacgcggatttggaacatgtcatgattacagatgaagaagaaatcaggaccaccaatcccgtggctacagagcagtacggaaacgtgtcaaataatttgcaaaactcaaatactggtccaactacagaaaatgtcaatcaccagggagcgttacctggtatggtgtggcaggatcgagacgtgtacctgcagggacccatttgggccaagattcctcacaccgacggacactttcacccttctccactgatgggaggttttggactcaaacacccgcctcctcaaatcatgatcaaaaacactcctgttccagcctatcctcctacaaacttcagcgcggcaaagtttgcttccttcatcacacagtattccacgagacaggtcagcgtggagatcgagtgggagctgcagaaggagaacagcaaacgctggaaccccgagatccagtacacttccaactacaacaaatctgttaatgtggactttactgtggacgctaatggtgtgtattcagagcctcgccccattggcaccagatacctgactcgtaatctgtaa

SEQ ID NO: 3614 - DNA, 2208 bp, Artificial Sequence
  source: /note="Description of Artificial Sequence: Synthetic polynucleotide"
atggctgccgatggttatcttccagattggctcgaggacactctctctgaaggaataagacagtggtggaagctcaaacctggcccaccaccaccaaggcccgcagagcggcatcaggacgacagcaggggtcttgtgcttcctgggtacaagtacctcggacccttcaacggactcgacaaaggagagccggtcaacgaggcagacgctgcggccctcgagcacgacaaggcctacgaccggcagctcgacagcggagacaacccgtacctcaagtacaaccacgccgacgcggagtttcaggagcgtcttaaagaagatacgtcttttgggggcaacctcggacgagcagtcttccaggcgaaaaagagggttcttgaacctctgggcctggttgaggaacctgttaagacggctccgggaaaaaagaggccggtagagcactctcctgcggagccagactcctcctcgggaaccggaaaagcgggccagcagcctgcaagaaagagattgaatttcggtcagactggagacgcagactccgtacctgacccccagcctctcggacagccaccagcagcccccacaagtttgggatctactacaatggctacaggcagtggcgcaccaatggcagacaataacgagggtgccgatggagtgggtaattcctcaggaaattggcattgcgattcccaatggctgggcgacagagtcatcaccaccagcacccgaacctgggccctgcccacctacaacaaccacctctacaagcaaatctccagccaatcaggagcatcgaacgacaaccactactttggctacagcaccccttgggggtattttgacttcaacagattccactgtcacttctccccacgtgactggcaaagactcatcaacaacaactggggattccgacccaagagactcaacttcaagctctttaacattcaagtcaaagaggtcacgcagaatgacggtacgacgacgattgccaataaccttaccagcacggttcaggtgtttactgactcggagtaccagctcccgtacgtcctcggctcggcgcatcaaggatgcctcccgccgtttccagcggacgtcttcatggtcccacagtatggatacctcaccctgaacaacgggagtcaggcggtaggacgctcttccttttactgcctggagtactttccttctcagatgctgcgtaccggaaacaactttaccttcagctacacctttgaggacgtgcccttccacagcagctacgctcacagccagagtttggaccggctgatgaatcctctgatcgaccagtatctgtattatctgaacaggacacaatcaaatagtggaactcttcagcagtctaggctactgtttagccaagctggacccaccagcatgtcccttcaagctaaaaactggctgcctggaccttgctacagacagcagcgtctgtcaaagcaggcaaacgacaacaacaacagcaactttccctggactgcggctacaaagtatcatctaaatggccgggactcgttggttaatccaggaccagctatggccagccacaaagacgatgaagaaaagtttttccccatgcatggaaccctgatatttggcaaacaagggacaaatgctaacgacgcggatttggacaatgtcatgattacagatgaagaagaaatccgtaccaccaatcccgtggctacggagcagtacgggactgtgtcaaataatttgcaaaactcaaatactggtccaactactggaactgtcaatcaccaaggagcgttacctggtatggtgtggcaggatcgagacgtgtaccttcagggacccatttgggccaagattcctcacaccgatggacactttcacccttctccgctgatgggaggttttggactcaaacacccgcctcctcagatcatgatcaaaaacactcccgttccagccaatcctcccacaaacttcagttctgccaagtttgcttctttcatcacacagtattccacgggacaggttagcgtggagatcgagtgggagctgcagaaggagaacagcaaacgctggaaccccgagatccagtacacttccaactacaacaagtctgttaatgtggactttactgtggacactaatggtgtgtattcagagcctcgccccattggcaccagatacctgactcgtaatctgtaa

SEQ ID NO: 3615 - DNA, 2208 bp, Artificial Sequence
  source: /note="Description of Artificial Sequence: Synthetic polynucleotide"
atggctgccgatggttatcttccagattggctcgaggacattctctctgaaggaataagacagtggtggaagctcaaacctggcccaccaccaccaaagcccgcagagcggcataaggacgacagcaggggtcttgtgcttcctgggtacaagtacctcggacccttcaacggactcgacaaaggagagccggtcaacgaggcagacgccgcggccctcgagcacgacaaggcctacgaccggcagctcgacagcggagacaacccgtacctcaagtacaaccacgccgacgcggagtttcaggagcgtcttaaagaagatacgtcttttgggggcaacctcggacgagcagtcttccaggcaaaaaagagggttcttgaacctctgggcctggttgaggaacctgttaagacggctccgggaaaaaagaggccggtagagcaatctcctgcggagccagactcctcctcgggaaccggaaaggcgggcaaccagcctgcaagaaagagattgaattttggtcagactggagacgcagactccgtacctgacccccagcctctcggacagccaccagcagccccctctggtctgggatctactacaatggctacaggcagtggcgcaccaatggcagacaataacgagggtgccgatggagtgggtaattcctcaggaaattggcattgcgattcccaatggttgggcgacagagtcatcaccaccagcacccgaacctgggccctgcccacctacaacaatcacctctacaagcaaatctccagccaatcaggagcagcgaacgacaaccactactttggctacagcaccccctgggggtattttgacttcaacagattccactgccacttttcaccacgtgactggcaaagactcatcaacaacaactggggattccgacccaaaagactcaacttcaagctctttaacattcaagtcaaagaggtcacgcagaatgacggtacgacgacgattgccaataaccttaccagcacggttcaggtgtttactgactcggagtaccagctcccgtacgtcctcggctcggcgcatcaaggatgcctcccgccgtttccagcggacgtcttcatggtcccacagtatggatacctcaccctgaacaacgggagtcaggcggtaggacgctcttccttttactgcctggagtactttccttctcagatgcttcgtaccggaaacaactttaccttcagttacacctttgaagacgttcctttccacagcagctacgctcacagtcaaagtctggaccggctgatgaatcctctgatagaccagtacctgtattatctaaacaaaacacaatcaaatagtggaactcttcagcagtctcggctactgtttagtcaagctggacccaccagcatgtctcttcaagctaaaaactggctgcctggaccttgctacagacaacagcgtctgtcaaagcaggcaaacgacaacaacaacagcaactttccctggactgcggctacaaagtatcatctaaatggccgggactcgttggttaatccaggaccagctatggccagccacaaagacgatgaagaaaagtttttccccatgcatggaaccctgatatttggtaaacaaggaacaaatgctaacgacgcggatttggacaatgtcatgattacagatgaagaagaaatccgcaccaccaatcccgtggctacggagcagtacgggactgtgtcaaataatttgcaaaactcaaatactggtccaactactggaactgtcaatcaccaaggagcgttacctggtatggtgtggcaggatcgagacgtgtaccttcagggacccatttgggccaagattcctcacaccgatggacactttcatccttctccactgatgggaggttttggactcaaacacccgcctcctcagatcatgatcaaaaacactcccgttccagccaatcctcctacaaacttcagttctgccaagtttgcttctttcatcacacagtattccacggggcaggtcagcgtggagatagagtgggagctgcagaaggagaacagcaaacgctggaaccccgagatccagtatacttccaactacaacaagtctgttaatgtggactttactgtggacactaatggtgtgtattcagagcctcgccccattggcaccagatacctgactcgtaatctgtaa

SEQ ID NO: 3616 - DNA, 2208 bp, Artificial Sequence
  source: /note="Description of Artificial Sequence: Synthetic polynucleotide"
atggctgccgatggttatcttccagattggctcgaggacactctctctgaaggaataagacagtggtggaagctcaaacctggcccaccaccaccaaggcccgcagagcggcatcaggacgacagcaggggtcttgtgcttcctgggtacaagtacctcggacccttcaacggactcgacaaaggagagccggtcaacgaggcagacgctgcggccctcgagcacgacaaggcctacgaccggcagctcgacagcggagacaacccgtacctcaagtacaaccacgccggcgcggagtttcaggagcgccttaaagaagatacgtcttttgggggcaacctcggacgagcagtattccaggcgaaaaagagggttcttgaacctctgggcctggttgaggagcctgttaagacggccccgggaaaaaagaggccggtagagcactctcctgtggagccagactcctcctcgggaaccggaaaagcgggccagcagcctgcgaggaagagattgaattttggtcagactggagacgcagactccgtacctgacccccagcctctcggacagccaccagcagcccccacaagtttgggatctactacaatggctacaggcagtggcgcaccaatggcagacaataacgagggtgccgatggagtgggtaattcctcagggaattggcattgcgattcccaatggttgggcgacagagtcatcaccaccagcacccgaacctgggccctgcccacctacaacaaccacctctacaagcaaatctccagccaatcaggagcagcgaacgacaaccactactttggctacagcaccccctgggggtattttgacttcaacagattccactgccacttttcaccacgtgactggcaaagactcatcaacaacaactggggattccgacccaagagactcaacttcaagctctttaacattcaagtcaaagaggtcacgcagaatgacggtacgacgacgattgccaataaccttaccagcacggttccggtgtttactgactcggagtaccagctcccgtacgtcctcggctcggcgcatcaaggatgcctcccgccgtttccagcggacgtcttcatggtcccacagtatggatacctcaccctgaacaacgggagtcaggcggtaggacgctcttccttttactgcctggagtactttccttctcagatgcttcgtaccggaaacaactttaccttcagttacacctttgaagacgttcctttccacagcagctacgctcacagtcaaagtctggaccggctgatgaatcctcttatcgaccagtacctgtattatctaaacaaaacacaatcaaatagtggaactcttcagcagtctcggctactgtttagtcaagctggacctaccagcatgtctcttcaagctaaaaactggctgcctggaccttgctacagacaacagcgtctgtcaaagcaggcaaacgacaacaacaacagcaactttccctggactgcggctacaaagtatcatctaaatggccgggactcgttggttaatccaggaccagctatggccagccacaaagacgatgaagaaaagtttttccccatgcatggaaccctgatatttggcaaacaagggacaaatgctaacgacgcggatttggacaatgtcatgattacagatgaagaagaaatccgtaccaccaatcccgtggctacggagcagtacgggactgtgtcaaataatttgcaaaactcaaatactggtccaactactggaactgtcaatcaccaaggagcgttacctggtatggtgtggcaggatcgagacgtgtaccttcagggacccatttgggccaagattcctcacaccgatggacactttcacccttctccgctgatgggaggttttggactcaaacacccgcctcctcagatcatgatcaaaaacactcccgttccagccaatcctcccacaaacttcagttctgccaagtttgcttctttcatcacacagtattccacgggacaggttagcgtggagatcgagtgggagctgcagaaggagaacagcaaacgctggaaccccgagatccagtacacttccaactacaacaagtctgttaatgtggactttactgtggacactaatggtgtgtattcagagcctcgccccattggcaccagatacctgactcgtaatctgtaa

SEQ ID NO: 3617 - DNA, 2205 bp, Artificial Sequence
  source: /note="Description of Artificial Sequence: Synthetic polynucleotide"
atggctgccgatggttatcttccagattggctcgaggacactctctctgaaggaataagacagtggtggaagctcaaacctggcccaccaccaaggcccgcagagcggcatcaggacgacagcaggggtcttgtgcttcctgggtacaagtacctcggacccttcaacggactcgacaaaggagagccggtcaacgaggcagacgctgcggccctcgagcacgacaaggcctacgaccggcagctcgacagcggagacaacccgtacctcaagtacaaccacgccgacgcggagtttcaggagcgtcttaaagaagatacgtcttttgggggcaacctcggacgagcagtcttccaggcgaaaaagagggttcttgaacctctgggcctggttgaggaacctgttaagacggctccgggaaaaaagaggccggtagagcactctcctgcggagccagactcctcctcgggaaccggaaaagcgggccagcagcctgcaagaaagagattgaatttcggtcagactggagacgcagactccgtacctgacccccagcctctcggacagccaccagcagcccccacaagtttgggatctactacaatggctacaggcagtggcgcaccaatggcagacaataacgagggtgccgatggagtgggtaattcctcaggaaattggcattgcgattcccaatggctgggcgacagagtcatcaccaccagcacccgaacctgggccctgcccacctacaacaaccacctctacaagcaaatctccagccaatcaggagcatcgaacgacaaccactactttggctacagcaccccttgggggtattttgacttcaacagattccactgtcacttctccccacgtgactggcaaagactcatcaacaacaactggggattccgacccaagagactcaacttcaagctctttaacattcaagtcaaagaggtcacgcagaatgacggtacgacgacgattgccaataaccttaccagcacggttcaggtgtttactgactcggagtaccagctcccgtacgtcctcggctcggcgcatcaaggatgcctcccgccgtttccagcggacgtcttcatggtcccacagtatggatacctcaccctgaacaacgggagtcaggcggtaggacgctcttccttttactgcctggagtactttccttctcagatgctgcgtaccggaaacaactttaccttcagctacacctttgaggacgtgcccttccacagcagctacgctcacagccagagtttggaccggctgatgaatcctctgatcgaccagtatctgtattatctgaacaggacacaatcaaatagtggaactcttcagcagtctaggctactgtttagccaagctggacccaccagcatgtcccttcaagctaaaaactggctgcctggaccttgctacagacagcagcgtctgtcaaagcaggcaaacgacaacaacaacagcaactttccctggactgcggctacaaagtatcatctaaatggtcgggactcgttggttaatccaggaccagctatggccagccacaaagacgatgaagaaaagtttttccccatgcatggaaccctgatatttggtaaacaaggaacaaatgctaacgacgcggatttggaacatgtcatgattacagatgaagaagaaatcaggaccaccaatcccgtggctacagagcagtacggaaacgtgtcaaataatttgcaaaactcaaatactggtccaactacagaaaatgtcaatcaccagggagcgttacctggtatggtgtggcaggatcgagacgtgtacctgcagggacccatttgggccaagattcctcacaccgacggacactttcacccttctccactgatgggaggttttggactcaaacacccgcctcctcaaatcatgatcaaaaacactcctgttccagccaatcctcctacaaacttcagcgcggcaaagtttgcttccttcatcacacagtattccacgggacaggtcagcgtggagatcgagtgggagctgcagaaggagaacagcaaacgctggaaccccgagatccagtacacttccaactacaacaaatctgttaatgtggactttactgtggacgctaatggtgtgtattcagagcctcgccccattggcaccagatacctgactcgtaatctgtaa

SEQ ID NO: 3618 - DNA, 2208 bp, Artificial Sequence
  source: /note="Description of Artificial Sequence: Synthetic polynucleotide"
atggctgccgatggttatcttccagattggctcgaggacactctctctgaaggaataagacagtggtggaagctcaaacctggcccaccaccaccaaagcccgcagagcggcatcaggacgacagcaggggtcttgtgcttcccgggcacaagtacctcggacccttcaacggactcgacaaaggagagccggtcaacgaggcagacgctgcggccctcgagcacgacaaggcctacgaccggcagctcgacagcggagacaacccgtacctcaagtacaaccacgccgacgcggagtttcaggagcgtcttaaagaagatacgtcttttgggggcaacctcggacgagcagtcttccaggcgaaaaagagggttcttgaacctctgggcctggttgaggaacctgttaagacggctccgggaaaaaagaggccggtagagcactctcctgcggagccagactcctcctcgggaaccggaaaagcgggccagcagcctgcaagaaagagattgaatttcggtcagactggagacgcagactccgtacctgacccccagcctctcggacagccaccagcagcccccacaagtttgggatctactacaatggctacaggcagtggcgcaccaatggcagacaataacgagggtgccgatggagtgggtaattcctcaggaaattggcattgcgattcccaatggctgggcgacagagtcatcaccaccagcacccgaacctgggccctgcccacctacaacaaccacctctacaagcaaatctccagccaatcaggagcatcgaacgacaaccactactttggctacagcaccccttgggggtattttgacttcaacagattccactgtcacttctccccacgtgactggcaaagactcatcaacaacaactggggattccgacccaagagactcaacttcaagctctttaacattcaagtcaaagaggtcacgcagaatgacggtacgacgacgattgccaataaccttaccagcacggttcaggtgtttactgactcggagtaccagctcccgtacgtcctcggctcggcgcatcaaggatgcctcccgccgtttccagcggacgtcttcatggtcccacagtatggatacctcaccctgaacaacgggagtcaggcggtaggacgctcttccttttactgcctggagtactttccttctcagatgctgcgtaccggaaacaactttaccttcagctacacctttgaggacgtgcccttccacagcagctacgctcacagccagagtttggaccggctgatgaatcctctgatcgaccagtatctgtattatctgaacaggacacaatcaaatagtggaactcttcagcagtctaggctactgtttagccaagctggacccaccagcatgtcccttcaagctaaaaactggctgcctggaccttgctacagacagcagcgtctgtcaaagcaggcaaacgacaacaacaacagcaactttccctggactgcggctacaaagtatcatctaaatggtcgggactcgttggttaatccaggaccagctatggccagccacaaagacgatgaagaaaagtttttccccatgcatggaaccctgatatttggtaaacaaggaacaaatgctaacgacgcggatttggaacatgtcatgattacagatgaagaagaaatcaggaccaccaatcccgtggctacagagcagtacggaaacgtgtcaaataatttgcaaaactcaaatactggtccaactacagaaaatgtcaatcaccagggagcgttacctggtatggtgtggcaggatcgagacgtgtacctgcagggacccatttgggccaagattcctcacaccgacggacactttcacccttctccactgatgggaggttttggactcaaacacccgcctcctcaaatcatgatcaaaaacactcctgttccagccaatcctcctacaaacttcagcgcggcaaagtttgcttccttcatcacacagtattccacgggacaggtcagcgtggagatcgagtgggagctgcagaaggagaacagcaaacgctggaaccccgagatccagtacacttccaactacaacaaatctgttaatgtggactttactgtagacactaatggtgtgtattcagagcctcgccccattggcaccagatacctgactcgtaatctgtaa

SEQ ID NO: 3619 - DNA, 2208 bp, Artificial Sequence
  source: /note="Description of Artificial Sequence: Synthetic polynucleotide"
atggctgccgatggttatcttccagattggctcgaggacactctctctgaaggaataagacagtggtggaagctcaaacctggcccaccaccaccaaggcccgcagagcggcatcaggacgacagcaggggtcttgtgcttcctgggtacaagtacctcggacccttcaacggactcgacaaaggagagccggtcaacgaggcagacgctgcggccctcgagcacgacaaggcctacgaccggcagctcgacagcggagacaacccgtacctcaagtacaaccacgccgacgcggagtttcaggagcgtcttaaagaagatacgtcttttgggggcaacctcggacgagcagtcttccaggcgaaaaagagggttcttgaacctctgggcctggttgaggaacctgttaagacggctccgggaaaaaagaggccggtagagcactctcctgcggagccagactcctcctcgggaaccggaaaagcgggccagcagcctgcaagaaagagattgaatttcggtcagactggagacgcagactccgtacctgacccccagcctctcggacagccaccagcagcccccacaagtttgggatctactacaatggctacaggcagtggcgcaccaatggcagacaataacgagggtgccgatggagtgggtaattcctcaggaaattggcattgcgattcccaatggctgggcgacagagtcatcaccaccagcacccgaacctgggccctgcccacctacaacaaccacctctacaagcaaatctccagccaatcaggagcatcgaacgacaaccactactttggctacagcaccccttgggggtattttgacttcaacagattccactgtcacttctccccacgtgactggcaaagactcatcaacaacaactggggattccgacccaagagactcaacttcaagctctttaacattcaagtcaaagaggtcacgcagaatgacggtacgacgacgattgccaataaccttaccagcacggttcaggtgtttactgactcggagtaccagctcccgtacgtcctcggctcggcgcatcaaggatgcctcccgccgtttccagcggacgtcttcatggtcccacagtatggatacctcaccctgaacaacgggagtcaggcggtaggacactcttcctcttactgcctggagtactttccttctcagatgctgcgtaccggaaacaactttaccttcagctacacctttgaggacgtgcctttccacagcagctacgctcacagccagagtttggaccggctgatgaatcctctgatcgaccagtatctgtattatctgaacaggacacaatcaaatagtggaactcttcagcagtctaggctactgtttagccaagctggacccaccagcatgtctcttcaagctaaaaactggctgcctggaccttgctacagacagcagcgtctgtcaaagcaggcaaacgacaacaacaacagcaactttccctggactgcggctacaaagtatcatctaaatggtcgggactcgttggttaatccaggaccagctatggccagccacaaagacgatgaagaaaagtttttccccatgcatggaaccctgatatttggtaaacaaggaacaaatgctaacgacgcggatttggaacatgtcatgattacagatgaagaagaaatcaggaccaccaatcccgtggctacagagcagtacggaaacgtgtcaaataatttgcaaaactcaaatactggtccaactacagaaaatgtcaatcaccagggagcgttacctggtatggtgtggcaggatcgagacgtgtacctgcagggacccatttgggccaagattcctcacaccgacggacactttcacccttctccactgatgggaggttttggactcaaacacccgcctcctcaaatcatgatcaaaaacactcctgttccagccaatcctcctacaaacttcagcgcggcaaagtttgcttccttcatcacacagtattccacgggacaggtcagcgtggagatcgagtgggagctgcagaaggagaacagcaaacgctggaaccccgagatccagtacacttccaactacaacaaatctgttaatgtggactttactgtggacgctaatggtgtgtattcagagcctcgccccattggcaccagatacctgactcgtaatctgtaa

SEQ ID NO: 3620 - DNA, 2208 bp, Artificial Sequence
  source: /note="Description of Artificial Sequence: Synthetic polynucleotide"
atggctgccgatggttatcttccagattggctcgaggacactctctctgaaggaataagacagtggtggaagctcaaacctggcccaccaccaccaaggcccgcagagcggcatcaggacgacagcaggggtcttgtgcttcctgggtacaagtacctcggacccttcaacggactcgacaaaggagagccggtcaacgaggcagacgctgcggccctcgagcacgacaaggcctacgaccggcagctcgacagcggagacaacccgtacctcaagtacaaccacgccgacgcggagtttcaggagcgtcttaaagaagatacgtcttttgggggcaacctcggacgagcagtcttccaggcgaaaaagagggttcttgaacctctgggcctggttgaggaacctgttaagacggctccgggaaaaaagaggccggtagagcactctcctgcggagccagactcctcctcgggaaccggaaaagcgggccagcagcctgcaagaaagagattgaatttcggtcagactggagacgcagactccgtacctgacccccagcctctcggacagccaccagcagcccccacaagtttgggatctactacaatggctacaggcagtggcgcaccaatggcagacaataacgagggtgccgatggagtgggtaattcctcaggaaattggcattgcgattcccaatggctgggcgacagggtcatcaccaccagcacccgaacccgggccctgcccacctacaacaaccacctctacaagcaaatctccagccaatcaggagcatcgaacgacaaccactactttggctacagcaccccttgggggtattttgacttcaacagattccactgtcacttctccccacgtgactggcaaagactcaccaacaacaactggggattccgacccaagagactcaacttcaagctctttaacattcaagtcaaagaggtcacgcagaatgacggtacgacgacgattgccaataaccttaccagcacggttcaggtgtttactgactcggagtaccagctcccgtacgtcctcggctcggcgcatcaaggatgcctcccgccgtttccagcggacgtcttcatggtcccacagtatggatacctcaccctgaacaacgggagtcaggcggtaggacgctcttccttttactgcctggagtactttccttctcagatgctgcgtaccggaaacaactttaccttcagctacacctttgaggacgtgcccttccacagcagctacgctcacagccagagtttggaccggctgatgaatcctctgatcgaccagtatctgtattatctgaacaggacacaatcaaatagtggaactcttcagcagtctaggctactgtttagccaagctggacccaccagcatgtcccttcaagctaaaaactggctgcctggaccttgctacagacagcagcgtctgtcaaagcaggcaaacgacaacaacaacagcaactttccctggactgcggctacaaagtatcatctaaatggtcgggactcgttggttaatccaggaccagctatggccagccacaaagacgatgaagaaaagtttttccccatgcatggaaccctgatatttggtaaacaaggaacaaatgctaacgacgcggatttggaacatgtcatgattacagatgaagaagaaatcaggaccaccaatcccgtggctacagagcagtacggaaacgtgtcaaataatttgcaaaactcaaatactggtccaactacagaaaatgtcaatcaccagggagcgttacctggtatggtgtggcaggatcgagacgtgtacctgcagggacccatttgggccaagattcctcacaccgacggacactttcacccttctccactgatgggaggttttggactcaaacacccgcctcctcaaatcatgatcaaaaacactcctgttccagccaatcctcctacaaacttcagcgcggcaaagtttgcttccttcatcacacagtattccacgggacaggtcagcgtggagatcgagtgggagctgcagaaggagaacagcaaacgctggaaccccgagatccagtacacttccaactacaacaaatctgttaatgtggactttactgtggacgctaatggtgtgtattcagagcctcgccccattggcaccagatacctgactcgtaatctgtaa

SEQ ID NO: 3621 - DNA, 2208 bp, Artificial Sequence
  source: /note="Description of Artificial Sequence: Synthetic polynucleotide"
atggctgccgatggttatcttccagattggctcgaggacactctctctgaaggaataagacagtggtggaagctcaaacctggcccaccaccgccaaagcccgcagagcggcataaggacgacagcaggggtcttgtgcttcctgggtacaagtacctcggacccttcaacggactcgacaaaggagagccggtcaacgaggcagacgccgcggccctcgagcacgacaaggcctacgaccggcagctcgacagcggagacaacccgtacctcaagtacaaccacgccgacgcggagtttcaggagcgccttaaagaagatacgtcttttgggggcaacctcgcaagagcagtattccaggcgaaaaagagggttcttgaacctctgggcctggttgaggagcctgttaagacggctccgggaaaaaagaggccggtagagcactctcctgcggggccagattcctcctccggaactggaaagtcgggccaacagcctgcaagaaagagattgaattttggtcagactggagacgcagactccgtacctgacccccagcctctcggacagccaccagcagccccctctggtctgggaactaatacgatggcttcaggcagtggcgcaccaatggcagacaataacgagggcgccgacggagtgggtaattcctcgggaaattggcattgcgattccacatggatgggcgacagagtcatcaccaccagcacccgcacctgggctctgcccacctacaacaaccatctgtacaagcaaatttccagccagtctggagcagcgaacgacaaccactactttggctacagcaccccttgggggtattttgacttcaacagattccactgtcacttctccccacgtgactggcaaagactcatcaacaacaactggggattccgacccaagagactcaacttcaagctctttaacattcaagtcaaagaggtcacgcagaatgacggtacgacgacgattgccaataaccttaccagcacggttcaggtgtttactgactcggagtaccagctcccgtacgtcctcggctcggcgcatcaaggatgcctcccgccgtttccagcggacgtcttcatggtcccacagtatggatacctcaccctgaacaacgggagtcaggcggtaggacgctcttccttttactgcctggagtactttccttctcagatgctgcgtaccggaaacaactttaccttcagctacacctttgaggacgtgcccttccacagcagctacgctcacagccagagtttggaccggctgatgaatcctctgatcgaccagtatctgtattatctgaacaggacacaatcaaatagtggaactcttcagcagtctaggctactgtttagccaagctggacccaccagcatgtcccttcaagctaaaaactggctgcctggaccttgctacagacagcagcgtctgtcaaagcaggcaaacgacaacaacaacagcaactttccctggactgcggctacaaagtatcatctaaatggtcgggactcgttggttaatccaggaccagctatggccagccacaaagacgatgaagaaaagtttttccccatgcatggaaccctgatatttggtaaacaaggaacaaatgctaacgacgcggatttggaacatgtcatgattacagatgaagaagaaatcaggaccaccaatcccgtggctacagagcagtacggaaacgtgtcaaataatttgcaaaactcaaatactggtccaactacagaaaatgtcaatcaccagggagcgttacctggtatggtgtggcaggatcgagacgtgtacctgcagggacccatttgggccaagattcctcacaccgacggacactttcacccttctccactgatgggaggttttggactcaaacacccgcctcctcaaatcatgatcaaaaacactcctgttccagccaatcctcctacaaacttcagcgcggcaaagtttgcttccttcatcacacagtattccacgggacaggtcagcgtggagatcgagtgggagctgcagaaggagaacagcaaacgctggaaccccgagatccagtacacttccaactacaacaaatctgttaatgtggactttactgtggacgctaatggtgtgtattcagagcctcgccccattggcaccagatacctgactcgtaatctgtaa

SEQ ID NO: 3622 - DNA, 2205 bp, Artificial Sequence
  source: /note="Description of Artificial Sequence: Synthetic polynucleotide"
atggctgccgatggttatcttccagattggctcgaggacactctctctgaaggaataagacagtggtggaagctcaaacctggcccaccaccaccaaggcccgcagagcggcatcaggacgacagcaggggtcttgtgcttcctgggtacaagtacctcggacccttcaacggactcgacaaaggagagccggtcaacgaggcagacgctgcggccctcgagcacgacaaggcctacgaccggcagctcgacagcggagacaacccgtacctcaagtacaaccacgccgacgcggagtttcaggagcgtcttaaagaagatacgtcttttgggggcaacctcggacgagcagtcttccaggcgaaaaagagggttcttgaacctctgggcctggttgaggaacctgttaagacggctccgggaaaaaagaggccggtagagcactctcctgcggagccagactcctcctcgggaaccggaaaagcgggccagcagcctgcaagaaagagattgaatttcggtcagactggagacgcagactccgtacctgacccccagcctctcggacagccaccagcagcccccacaagtttgggatctactacaatggctacaggcagtggcgcaccaatggcagacaataacgagggtgccgatggagtgggtaattcctcaggaaattggcattgcgattcccaatggctgggcgacagagtcatcaccaccagcacccgaacctgggccctgcccacctacaacaaccacctctacaagcaaatctccagccaatcaggagcatcgaacgacaaccactactttggctacagcaccccttgggggtattttgacttcaacagattccactgtcacttctccccacgtgactggcaaagactcatcaacaacaactggggattccgacccaagagactcaacttcaagctctttaacattcaagtcaaagaggtcacgcagaatgacggtacgacgacgattgccaataaccttaccagcacggttcaggtgtttactgactcggagtaccagctcccgtacgtcctcggctcggcgcatcaaggatgcctcccgccgtttccagcggacgtcttcatggtcccacagtatggatacctcaccctgaacaacgggagtcaggcggtaggacgctcttccttttactgcctggagtactttccttctcagatgctgcgtaccggaaacaactttaccttcagctacacctttgaggacgtgcccttccacagcagctacgctcacagccagagtttggaccggctgatgaatcctctgatcgaccagtatctgtattatctgaacaggacacaatcaaatagtggaactcttcagcagtctaggctactgtttagccaagctggacccaccagcatgtcccttcaagctaaaaactggctgcctggaccttgctacagacagcagcgtctgtcaaagcaggcaaacgacaacaacagcaactttccctggactgcggctacaaagtatcatctaaatggtcgggactcgttggttaatccaggaccagctatggccagccacaaagacgatgaagaaaagtttttccccatgcatggaaccctgatatttggtaaacaaggaacaaatgctaacgacgcggatttggaacatgtcatgattacagatgaagaagaaatcaggaccaccaatcccgtggctacagagcagtacggaaacgtgtcaaataatttgcaaaactcaaatactggtccaactacagaaaatgtcaatcaccagggagcgttacctggtatggtgtggcaggatcgagacgtgtacctgcagggacccatttgggccaagattcctcacaccgacggacactttcacccttctccactgatgggaggttttggactcaaacacccgcctcctcaaatcatgatcaaaaacactcctgttccagccaatcctcctacaaacttcagcgcggcaaagtttgcttccttcatcacacagtattccacgggacaggtcagcgtggagatcgagtgggagctgcagaaggagaacagcaaacgctggaaccccgagatccagtacacttccaactacaacaaatctgttaatgtggactttactgtggacgctaatggtgtgtattcagagcctcgccccattggcaccagatacctgactcgtaatctgtaa

SEQ ID NO: 3623 - DNA, 2208 bp, Artificial Sequence
  source: /note="Description of Artificial Sequence: Synthetic polynucleotide"
atggctgccgatggttatcttccagattggctcgaggacactctctctgaaggaataagacagtggtggaagctcaaacctggcccaccaccgccaaagcccgcagagcggcataaggacgacagcaggggtcttgtgcttcctgggtacaagtacctcggacccttcaacggactcgacaaaggagagccggtcaacgaggcagacgccgcggccctcgagcacgacaaggcctacgaccggcagctcgacagcggagacaacccgtacctcaagtacaaccacgccgacgcggagtttcaggagcgccttaaagaagatacgtcttttgggggcaacctcgcaagagcagtattccaggcgaaaaagagggttcttgaacctctgggcctggttgaggagcctgttaagacggctccgggaaaaaagaggccggtagagcactctcctgcggggccagattcctcctccggaactggaaagtcgggccaacagcctgcaagaaagagattgaattttggtcagactggagacgcagactccgtacctgacccccagcctctcggacagccaccagcagcccccacaagtttgggatctactacaatggctacaggcagtggcgcaccaatggcagacaataacgagggtgccgatggagtgggtaattcctcaggaaattggcattgcgattcccaatggctgggcgacagagtcatcaccaccagcacccgaacctgggccctgcccacctacaacaaccacctctacaagcaaatctccagccaatcaggagcatcgaacgacaaccactactttggctacagcaccccttgggggtattttgacttcaacagattccactgtcacttctccccacgtgactggcaaagactcatcaacaacaactggggattccgacccaagagactcaacttcaagctctttaacattcaagtcaaagaggtcacgcagaatgacggtacgacgacgattgccaataaccttaccagcacggttcaggtgtttactgactcggagtaccagctcccgtacgtcctcggctcggcgcatcaaggatgcctcccgccgtttccagcggacgtcttcatggtcccacagtatggatacctcaccctgaacaacgggagtcaggcggtaggacgctcttccttttactgcctggagtactttccttctcagatgctgcgtaccggaaacaactttaccttcagctacacctttgaggacgtgcccttccacagcagctacgctcacagccagagtttggaccggctgatgaatcctctgatcgaccagtatctgtattatctgaacaggacacaatcaaatagtggaactcttcagcagtctaggctactgtttagccaagctggacccaccagcatgtcccttcaagctaaaaactggctgcctggaccttgctacagacagcagcgtctgtcaaagcaggcaaacgacaacaacaacagcaactttccctggactgcggctacaaagtatcatctaaatggtcgggactcgttggttaatccaggaccagctatggccagccacaaagacgatgaagaaaagtttttccccatgcatggaaccctgatatttggtaaacaaggaacaaatgctaacgacgcggatttggaacatgtcatgattacagatgaagaagaaatcaggaccaccaatcccgtggctacagagcagtacggaaacgtgtcaaataatttgcaaaactcaaatactggtccaactacagaaaatgtcaatcaccagggagcgttacctggtatggtgtggcaggatcgagacgtgtacctgcagggacccatttgggccaagattcctcacaccgacggacactttcacccttctccactgatgggaggttttggactcaaacacccgcctcctcaaatcatgatcaaaaacactcctgttccagccaatcctcctacaaacttcagcgcggcaaagtttgcttccttcatcacacagtattccacgggacaggtcagcgtggagatcgagtgggagctgcagaaggagaacagcaaacgctggaaccccgagatccagtacacttccaactacaacaaatctgttaatgtggactttactgtggacgctaatggtgtgtattcagagcctcgccccattggcaccagatacctgactcgtaatctgtaa

SEQ ID NO: 3624 - DNA, 2208 bp, Artificial Sequence
  source: /note="Description of Artificial Sequence: Synthetic polynucleotide"
atggctgccgatggttatcttccagattggctcgaggacactctctctgaaggaataagacagtggtggaagctcaaacctggcccaccaccgccaaagcccgcagggcggcataaggacgacagcaggggtcttgtgcttcctgggtacaagtacctcggacccttcaacggactcgacaagggagagccggtcaacgaggcagacgccgcggccctcgagcacgacaaggcctacgaccggcagctcgacagcggagacaacccgtacctcaagtacaaccacgccggcgcggagtttcaggagcgccttaaagaagatacgtcttttgggggcaacctcggacgagcagtattccaggcgaaaaagagggttcttgaacctctgggcctggttgaggagcctgttaagacggccccgggaaaaaagaggccggtagagcactctcctgtggagccagactcctcctcgggaaccggaaaagcgggccagcagcctgcgaggaagagattgaattttggtcagactggagacgcagactccgtacctgacccccagcctctcggacagccaccagcagcccccacaagtttgggatctactacaatggctacaggcagtggcgcaccaatggcagacaataacgagggtgccgatggagtgggtaattcctcagggaattggcattgcgattcccaatggttgggcgacagagtcatcaccaccagcacccgaacctgggccctgcccacctacaacaaccacctctacaagcaaatctccagccaatcaggagcagcgaacgacaaccactactttggctacagcaccccctgggggtattttgacttcaacagattccactgccacttttcaccacgtgactggcaaagactcatcaacaacaactggggattccgacccaagagactcaacttcaagctctttaacattcaagtcaaagaggtcacgcagaatgacggtacgacgacgattgccaataaccttaccagcacggttccggtgtttactgactcggagtaccagctcccgtacgtcctcggctcggcgcatcaaggatgcctcccgccgtttccagcggacgtcttcatggtcccacagtatggatacctcaccctgaacaacgggagtcaggcggtaggacgctcttccttttactgcctggagtactttccttctcagatgcttcgtaccggaaacaactttaccttcagttacacctttgaagacgttcctttccacagcagctacgctcacagtcaaagtctggaccggctgatgaatcctcttatcgaccagtacctgtattatctaaacaaaacacaatcaaatagtggaactcttcagcagtctcggctactgtttagtcaagctggacctaccagcatgtctcttcaagctaaaaactggctgcctggaccttgctacagacaacagcgtctgtcaaagcaggcaaacgacaacaacaacagcaactttccctggactgcggctacaaagtatcatctaaatggccgggactcgttggttaatccaggaccagctatggccagccacaaagacgatgaagaaaagtttttccccatgcatggaaccctgatatttggtaaacaaggaacaaatgctaacgacgcggatttggaacatgtcatgattacagatgaagaagaaatcaggaccaccaatcccgtggctacagagcagtacggaaacgtgtcaaataatttgcaaaactcaaatactggtccaactacagaaaatgtcaatcaccagggagcgttacctggtatggtgtggcaggatcgagacgtgtacctgcagggacccatttgggccaagattcctcacaccgacggacactttcacccttctccactgatgggaggttttggactcaaacacccgcctcctcaaatcatgatcaaaaacactcctgttccagccaatcctcctacaaacttcagcgcggcaaagtttgcttccttcatcacacagtattccacgggacaggtcagcgtggagatcgagtgggagctgcagaaggagaacagcaaacgctggaaccccgagatccagtacacttccaactacaacaaatctgttaatgtggactttactgtggacgctaatggtgtgtattcagagcctcgccccattggcaccagatacctgactcgtaatctgtaa

SEQ ID NO: 3625 - DNA, 2208 bp, Artificial Sequence
  source: /note="Description of Artificial Sequence: Synthetic polynucleotide"
atggctgccgatggttatcttccagattggctcgaggacactctctctgaaggaataagacagtggtggaagctcaaacctggcccaccaccgccaaagcccgcagggcggcataaggacgacagcaggggtcttgtgcttcctgggtacaagtacctcggacccttcaacggactcgacaagggagagccggtcaacgaggcagacgccgcggccctcgagcacgacaaggcctacgaccggcagctcgacagcggagacaacccgtacctcaagtacaaccacgccggcgcggagtttcaggagcgccttaaagaagatacgtcttttgggggcaacctcggacgagcagtattccaggcgaaaaagagggttcttgaacctctgggcctggttgaggagcctgttaagacggccccgggaaaaaagaggccggtagagcactctcctgtggagccagactcctcctcgggaaccggaaaagcgggccagcagcctgcgaggaagagattgaattttggtcagactggagacgcagactccgtacctgacccccagcctctcggacagccaccagcagcccccacaagtttgggatctactacaatggctacaggcagtggcgcaccaatggcagacaataacgagggtgccgatggagtgggtaattcctcagggaattggcattgcgattcccaatggttgggcgacagagtcatcaccaccagcacccgaacctgggccctgcccacctacaacaaccacctctacaagcaaatctccagccaatcaggagcagcgaacgacaaccactactttggctacagcaccccctgggggtattttgacttcaacagattccactgccacttttcaccacgtgactggcaaagactcatcaacaacaactggggattccgacccaagagactcaacttcaagctctttaacattcaagtcaaagaggtcacgcagaatgacggtacgacgacgattgccaataaccttaccagcacggttccggtgtttactgactcggagtaccagctcccgtacgtcctcggctcggcgcatcaaggatgcctcccgccgtttccagcggacgtcttcatggtcccacagtatggatacctcaccctgaacaacgggagtcaggcggtaggacgctcttccttttactgcctggagtactttccttctcagatgcttcgtaccggaaacaactttaccttcagttacacctttgaagacgttcctttccacagcagctacgctcacagtcaaagtctggaccggctgatgaatcctcttatcgaccagtacctgtattatctaaacaaaacacaatcaaatagtggaactcttcagcagtctcggctactgtttagtcaagctggacctaccagcatgtctcttcaagctaaaaactggctgcctggaccttgctacagacaacagcgtctgtcaaagcaggcaaacgacaacaacaacagcaactttccctggactgcggctacaaagtatcatctaaatggccgggactcgttggttaatccaggaccagctatggccagccacaaagacgatgaagaaaagtttttccccatgcatggaaccctgatatttggcaaacaagggacaaatgctaacgacgcggatttggacaatgtcatgattacagatgaagaagaaatccgtaccaccaatcccgtggctacggagcagtacgggactgtgtcaaataatttgcaaaactcaaatactggtccaactactggaactgtcaatcaccaaggagcgttacctggtatggtgtggcaggatcgagacgtgtacctgcagggacccatttgggccaagattcctcacaccgacggacactttcacccttctccactgatgggaggttttggactcaaacacccgcctcctcaaatcatgatcaaaaacactcctgttccagccaatcctcctacaaacttcagcgcggcaaagtttgcttccttcatcacacagtattccacgggacaggtcagcgtggagatcgagtgggagctgcagaaggagaacagcaaacgctggaaccccgagatccagtacacttccaactacaacaaatctgttaatgtggactttactgtggacgctaatggtgtgtattcagagcctcgccccattggcaccagatacctgactcgtaatctgtaa

SEQ ID NO: 3626 - DNA, 2208 bp, Artificial Sequence
  source: /note="Description of Artificial Sequence: Synthetic polynucleotide"
atggctgccgatggttatcttccagattggctcgaggacactctctctgaaggaataagacagtggtggaagctcaaacctggcccaccaccaccaaggcccgcagagcggcatcaggacgacagcaggggtcttgtgcttcctgggtacaagtacctcggacccttcaacggactcgacaaaggagagccggtcaacgaggcagacgctgcggccctcgagcacgacaaggcctacgaccggcagctcgacagcggagacaacccgtacctcaagtacaaccacgccgacgcggagtttcaggagcgtcttaaagaagatacgtcttttgggggcaacctcggacgagcagtcttccaggcgaaaaagagggttcttgaacctctgggcctggttgaggaacctgttaagacggctccgggaaaaaagaggccggtagagcactctcctgcggagccagactcctcctcgggaaccggaaaagcgggccagcagcctgcaagaaagagattgaatttcggtcagactggagacgcagactccgtacctgacccccagcctctcggacagccaccagcagcccccacaagtttgggatctactacaatggctacaggcagtggcgcaccaatggcagacaataacgagggtgccgatggagtgggtaattcctcaggaaattggcattgcgattcccaatggctgggcgacagagtcatcaccaccagcacccgaacctgggccctgcccacctacaacaaccacctctacaagcaaatctccagccaatcaggagcatcgaacgacaaccactactttggctacagcaccccttgggggtattttgacttcaacagattccactgtcacttctccccacgtgactggcaaagactcatcaacaacaactggggattccgacccaagagactcaacttcaagctctttaacattcaagtcaaagaggtcacgcagaatgacggtacgacgacgattgccaataaccttaccagcacggttcaggtgtttactgactcggagtaccagctcccgtacgtcctcggctcggcgcatcaaggatgcctcccgccgtttccagcggacgtcttcatggtcccacagtatggatacctcaccctgaacaacgggagtcaggcggtaggacgctcttccttttactgcctggagtactttccttctcagatgctgcgtaccggaaacaactttaccttcagctacacctttgaggacgtgcccttccacagcagctacgctcacagccagagtttggaccggctgatgaatcctctgatcgaccagtatctgtattatctgaacaggacacaatcaaatagtggaactcttcagcagtctaggctactgtttagccaagctggacccaccagcatgtcccttcaagctaaaaactggctgcctggaccttgctacagacagcagcgtctgtcaaagcaggcaaacgacaacaacaacagcaactttccctggactgcggctacaaagtatcatctaaatggtcgggactcgttggttaatccaggaccagctatggccagccacaaagacgatgaagaaaagtttttccccatgcatggaaccctgatatttggtaaacaaggaacaaatgctaacgacgcggatttggaacatgtcatgattacagatgaagaagaaatcaggaccaccaatcccgtggctacagagcagtacggaaacgtgtcaaataatttgcaaaactcaaatactggtccaactacagaaaatgtcaatcaccagggagcgttacctggtatggtgtggcaggatcgagacgtgtacctgcagggacccatttgggccaagattcctcacaccgacggacactttcacccttctccgctgatgggaggttttggactcaaacacccgcctcctcagatcatgatcaaaaacactcccgttccagccaatcctcccacaaacttcagttctgccaagtttgcttctttcatcacacagtattccacgggacaggttagcgtggagatcgagtgggagctgcagaaggagaacagcaaacgctggaaccccgagatccagtacacttccaactacaacaagtctgttaatgtggactttactgtggacactaatggtgtgtattcagagcctcgccccattggcaccagatacctgactcgtaatctgtaa

SEQ ID NO: 3627 - DNA, 2208 bp, Artificial Sequence
  source: /note="Description of Artificial Sequence: Synthetic polynucleotide"
atggctgccgatggttatcttccagattggctcgaggacactctctctgaaggaataagacagtggtggaagctcaaacctggcccaccaccaccaaagcccgcagagcggcatcaggacgacagcaggggtcttgtgcttcctgggtacaagtacctcggacccttcaacggactcgacaaaggagagccggtcaacgaggcagacgctgcggccctcgagcacgacaaggcctacgaccggcagctcgacagcggagacaacccgtacctcaagtacaaccacgccgacgcggagtttcaggagcgtcttaaagaagatacgtcttttgggggcaacctcggacgagcagtcttccaggcgaaaaagagggttcttgaacctctgggcctggttgaggaacctgttaagacggctccgggaaaaaagaggccggtagagcactctcctgcggagccagactcctcctcgggaaccggaaaagcgggccagcagcctgcaagaaagagattgaatttcggtcagactggagacgcagactccgtacctgacccccagcctctcggacagccaccagcagcccccacaagtttgggatctactacaatggctacaggcagtggcgcaccaatggcagacaataacgagggtgccgatggagtgggtaattcctcaggaaattggcattgcgattcccaatggctgggcgacagagtcatcaccaccagcacccgaacctgggccctgcccacctacaacaaccacctctacaagcaaatctccagccaatcaggagcagcgaacgacaaccactactttggctacagcaccccctgggggtattttgacttcaacagattccactgccacttttcaccacgtgactggcaaagactcatcaacaacaactggggattccgacccaagagactcaacttcaagctctttaacattcaagtcaaagaggtcacgcagaatgacggtacgacgacgattgccaataaccttaccagcacggttccggtgtttactgactcggagtaccagctcccgtacgtcctcggctcggcgcatcaaggatgcctcccgccgtttccagcggacgtcttcatggtcccacagtatggatacctcaccctgaacaacgggagtcaggcggtaggacgctcttccttttactgcctggagtactttccttctcagatgcttcgtaccggaaacaactttaccttcagttacacctttgaagacgttcctttccacagcagctacgctcacagtcaaagtctggaccggctgatgaatcctcttatcgaccagtacctgtattatctaaacaaaacacaatcaaatagtggaactcttcagcagtctcggctactgtttagtcaagctggacctaccagcatgtctcttcaagctaaaaactggctgcctggaccttgctacagacaacagcgtctgtcaaagcaggcaaacgacaacaacaacagcaactttccctggactgcggctacaaagtatcatctaaatggccgggactcgttggttaatccaggaccagctatggccagccacaaagacgatgaagaaaagtttttccccatgcatggaaccctgatatttggcaaacaagggacaaatgctaacgacgcggatttggacaatgtcatgattacagatgaagaagaaatccgtaccaccaatcccgtggctacggagcagtacgggactgtgtcaaataatttgcaaaactcaaatactggtccaactactggaactgtcaatcaccaaggagcgttacctggtatggtgtggcaggatcgagacgtgtaccttcagggacccatttgggccaagattcctcacaccgatggacactttcacccttctccgctgatgggaggttttggactcaaacacccgcctcctcagatcatgatcaaaaacactcccgttccagccaatcctcccacaaacttcagttctgccaagtttgcttctttcatcacacagtattccacgggacaggttagcgtggagatcgagtgggagctgcagaaggagaacagcaaacgctggaaccccgagatccagtacacttccaactacaacaagtctgttaatgtggactttactgtggacactaatggtgtgtattcagagcctcgccccattggcaccagatacctgactcgtaatctgtaa

SEQ ID NO: 3628 - DNA, 2208 bp, Artificial Sequence
  source: /note="Description of Artificial Sequence: Synthetic polynucleotide"
atggctgccgatggttatcttccagattggctcgaggacactctctctgaaggaataagacagtggtggaagctcaaacctggcccaccaccgccaaagcccgcagagcggcataaggacgacagcaggggtcttgtgcttcctgggtacaagtacctcggacccttcaacggactcgacaaaggagagccggtcaacgaggcagacgccgcggccctcgagcacgacaaggcctacgaccggcagctcgacagcggagacaacccgtacctcaagtacaaccacgccgacgcggagtttcaggagcgccttaaagaagatacgtcttttgggggcaacctcgcaagagcagtattccaggcgaaaaagagggttcttgaacctctgggcctggttgaggagcctgttaagacggctccgggaaaaaagaggccggtagagcactctcctgcggggccagattcctcctccggaactggaaagtcgggccaacagcctgcaagaaagagattgaattttggtcagactggagacgcagactccgtacctgacccccagcctctcggacagccaccagcagccccctctggtctgggaactaatacgatggcttcaggcagtggcgcaccaatggcagacaataacgagggcgccgacggagtgggtaattcctcgggaaattggcattgcgattccacatggatgggcgacagagtcatcaccaccagcacccgcacctgggctctgcccacctacaacaaccatctgtacaagcaaatttccagccagtctggagcagcgaacgacaaccactactttggctacagcaccccttgggggtattttgacttcaacagattccactgccacttctccccacgtgactggcaaagactcatcaacaacaattggggattccggcccaaaagactcaacttcgagctctttaacattcaagtcaaggaggtcacgcagaatgacggtacgacgacgattgccaataaccttaccagcacggttcaggtgtttactgactcggagtaccagctcccgtacgtcctcggctcggcgcatcaaggatgcctcccgccgttcccagcagacgtcttcatggtgccacagtatggatacctcaccctgaacaacgggagtcaggcggtaggacgctcttcattttactgcctggagtactttccttctcagatgctgcgtaccggaaacaactttaccttcagctacacctttgaggacgtgcccttccacagcagctacgctcacagccagagtttggaccggctgatgaatcctctgatcgaccagtatctgtattatctgaacaggacacaatcaaatagtggaactcttcagcagtctaggctactgtttagccaagctggacccaccagcatgtcccttcaagctaaaaactggctgcctggaccttgctacagacagcagcgtctgtcaaagcaggcaaacgacaacaacaacagcaactttccctggactgcggctacaaagtatcatctaaatggtcgggactcgttggttaatccaggaccagctatggccagccacaaagacgatgaagaaaagtttttccccatgcatggaaccctgatatttggtaaacaaggaacaaatgctaacgacgcggatttggaacatgtcatgattacagatgaagaagaaatcaggaccaccaatcccgtggctacagagcagtacggaaacgtgtcaaataatttgcaaaactcaaatactggtccaactacagaaaatgtcaatcaccagggagcgttacctggtatggtgtggcaggatcgagacgtgtacctgcagggacccatttgggccaagattcctcacaccgacggacactttcacccttctccactgatgggaggttttggactcaaacacccgcctcctcaaatcatgatcaaaaacactcctgttccagccaatcctcctacaaacttcagcgcggcaaagtttgcttccttcatcacacagtattccacgggacaggtcagcgtggagatcgagtgggagctgcagaaggagaacagcaaacgctggaaccccgagatccagtacacttccaactacaacaaatctgttaatgtggactttactgtggacgctaatggtgtgtattcagagcctcgccccattggcaccagatacctgactcgtaatctgtaa

SEQ ID NO: 3629 - DNA, 2208 bp, Artificial Sequence
  source: /note="Description of Artificial Sequence: Synthetic polynucleotide"
atggctgccgatggttatcttccagattggctcgaggacattctctctgaaggaataagacagtggtggaagctcaaacctggcccaccaccaccaaagcccgcagagcggcataaggacgacagcaggggtcttgtgcttcctgggtacaagtacctcggacccttcaacggactcgacaaaggagagccggtcaacgaggcagacgccgcggccctcgagcacgacaaggcctacgaccggcagctcgacagcggagacaacccgtacctcaagtacaaccacgccgacgcggagtttcaggagcgtcttaaagaagatacgtcttttgggggcaacctcggacgagcagtcttccaggcgaaaaagagggttcttgaacctctgggcctggttgaggaacctgttaagacggctccgggaaaaaagaggccggtagagcactctcctgcggagccagactcctcctcgggaaccggaaaagcgggccagcagcctgcaagaaagagattgaatttcggtcagactggagacgcagactccgtacctgacccccagcctctcggacagccaccagcagcccccacaagtttgggatctactacaatggctacaggcagtggcgcaccaatggcagacaataacgagggtgccgatggagtgggtaattcctcaggaaattggcattgcgattcccaatggctgggcgacagagtcatcaccaccagcacccgaacctgggccctgcccacctacaacaaccacctctacaagcaaatctccagccaatcaggagcatcgaacgacaaccactactttggctacagcaccccttgggggtattttgacttcaacagattccactgtcacttctccccacgtgactggcaaagactcatcaacaacaactggggattccgacccaagagactcaacttcaagctctttaacattcaagtcaaagaggtcacgcagaatgacggtacgacgacgattgccaataaccttaccagcacggttcaggtgtttactgactcggagtaccagctcccgtacgtcctcggctcggcgcatcaaggatgcctcccgccgtttccagcggacgtcttcatggtcccacagtatggatacctcaccctgaacaacgggagtcaggcggtaggacgctcttccttttactgcctggagtactttccttctcagatgctgcgtaccggaaacaactttaccttcagctacacctttgaggacgtgcccttccacagcagctacgctcacagccagagtttggaccggctgatgaatcctctgatcgaccagtatctgtattatctgaacaggacacaatcaaatagtggaactcttcagcagtctaggctactgtttagccaagctggacccaccagcatgtcccttcaagctaaaaactggctgcctggaccttgctacagacagcagcgtctgtcaaagcaggcaaacgacaacaacaacagcaactttccctggactgcggctacaaagtatcatctaaatggtcgggactcgttggttaatccaggaccagctatggccagccacaaagacgatgaagaaaagtttttccccatgcatggaaccctgatatttggtaaacaaggaacaaatgctaacgacgcggatttggaacatgtcatgattacagatgaagaagaaatcaggaccaccaatcccgtggctacagagcagtacggaaacgtgtcaaataatttgcaaaactcaaatactggtccaactacagaaaatgtcaatcaccagggagcgttacctggtatggtgtggcaggatcgagacgtgtacctgcagggacccatttgggccaagattcctcacaccgacggacactttcacccttctccactgatgggaggttttggactcaaacacccgcctcctcaaatcatgatcaaaaacactcctgttccagccaatcctcctacaaacttcagcgcggcaaagtttgcttccttcatcacacagtattccacgggacaggtcagcgtggagatcgagtgggagctgcagaaggagaacagcaaacgctggaaccccgagatccagtacacttccaactacaacaaatctgttaatgtggactttactgtggacgctaatggtgtgtattcagagcctcgccccattggcaccagatacctgactcgtaatctgtaa

SEQ ID NO: 3630 - DNA, 2208 bp, Artificial Sequence
  source: /note="Description of Artificial Sequence: Synthetic polynucleotide"
atggctgccgatggttatcttccagattggctcgaggacactctctctgaaggaataagacagtggtggaagctcaaacctggcccaccaccaccaaggcccgcagagcggcatcaggacgacagcaggggtcttgtgcttcctgggtacaagtacctcggacccttcaacggactcgacaaaggagagccggtcaacgaggcagacgctgcggccctcgagcacgacaaggcctacgaccggcagctcgacagcggagacaacccgtacctcaagtacaaccacgccgacgcggagtttcaggagcgtcttaaagaagatacgtcttttgggggcaacctcggacgagcagtattccaggcgaaaaagagggttcttgaacctctgggcctggttgaggagcctgttaagacggccccgggaaaaaagaggccggtagagcactctcctgtggagccagactcctcctcgggaaccggaaaagcgggccagcagcctgcgaggaagagattgaattttggtcagactggagacgcagactccgtacctgacccccagcctctcggacagccaccagcagcccccacaagtttgggatctactacaatggctacaggcagtggcgcaccaatggcagacaataacgagggtgccgatggagtgggtaattcctcagggaattggcattgcgattcccaatggttgggcgacagagtcatcaccaccagcacccgaacctgggccctgcccacctacaacaaccacctctacaagcaaatctccagccaatcaggagcagcgaacgacaaccactactttggctacagcaccccctgggggtattttgacttcaacagattccactgccacttttcaccacgtgactggcaaagactcatcaacaacaactggggattccgacccaagagactcaacttcaagctctttaacattcaagtcaaagaggtcacgcagaatgacggtacgacgacgattgccaataaccttaccagcacggttccggtgtttactgactcggagtaccagctcccgtacgtcctcggctcggcgcatcaaggatgcctcccgccgtttccagcggacgtcttcatggtcccacagtatggatacctcaccctgaacaacgggagtcaggcggtaggacgctcttccttttactgcctggagtactttccttctcagatgcttcgtaccggaaacaactttaccttcagttacacctttgaagacgttcctttccacagcagctacgctcacagtcaaagtctggaccggctgatgaatcctcttatcgaccagtacctgtattatctaaacaaaacacaatcaaatagtggaactcttcagcagtctcggctactgtttagtcaagctggacctaccagcatgtctcttcaagctaaaaactggctgcctggaccttgctacagacaacagcgtctgtcaaagcaggcaaacgacaacaacaacagcaactttccctggactgcggctacaaagtatcatctaaatggccgggactcgttggttaatccaggaccagctatggccagccacaaagacgatgaagaaaagtttttccccatgcatggaaccctgatatttggcaaacaagggacaaatgctaacgacgcggatttggacaatgtcatgattacagatgaagaagaaatccgtaccaccaatcccgtggctacggagcagtacgggactgtgtcaaataatttgcaaaactcaaatactggtccaactactggaactgtcaatcaccaaggagcgttacctggtatggtgtggcaggatcgagacgtgtaccttcagggacccatttgggccaagattcctcacaccgatggacactttcacccttctccgctgatgggaggttttggactcaaacacccgcctcctcagatcatgatcaaaaacactcccgttccagccaatcctcccacaaacttcagttctgccaagtttgcttctttcatcacacagtattccacgggacaggttagcgtggagatcgagtgggagctgcagaaggagaacagcaaacgctggaaccccgagatccagtacacttccaactacaacaagtctgttaatgtggactttactgtggacactaatggtgtgtattcagagcctcgccccattggcaccagatacctgactcgtaatctgtaa

SEQ ID NO: 3631 - DNA, 2208 bp, Artificial Sequence
  source: /note="Description of Artificial Sequence: Synthetic polynucleotide"
atggctgccgatggttatcttccagattggctcgaggacactctctctgaaggaataagacagtggtggaagctcaaacctggcccaccaccgccaaagcccgcagagcggcataaggacgacagcaggggtcttgtgcttcctgggtacaagtacctcggacccttcaacggactcgacaaaggagagccggtcaacgaggcagacgccgcggccctcgagcacgacaaggcctacgaccggcagctcgacagcggagacaacccgtacctcaagtacaaccacgccgacgcggagtttcaggagcgccttaaagaagatacgtcttttgggggcaacctcgcaagagcagtattccaggcgaaaaagagggttcttgaacctctgggcctggttgaggagcctgttaagacggctccgggaaaaaagaggccggtagagcactctcctgcggagccagattcctcctccggaaccggaaaagcgggccagcagcctgcaagaaagagattgaatttcggtcagactggagacgcagactccgtacctgacccccagcctctcggacagccaccagcagcccccacaagtttgggatctactacaatggctacaggcagtggcgcaccaatggcagacaataacgagggtgccgatggagtgggtaattcctcaggaaattggcattgcgattcccaatggctgggcgacagagtcatcaccaccagcacccgaacctgggccctgcccacctacaacaaccacctctacaagcaaatctccagccaatcaggagcatcgaacgacaaccactactttggctacagcaccccttgggggtattttgacttcaacagattccactgtcacttctccccacgtgactggcaaagactcatcaacaacaactggggattccgacccaagagactcaacttcaagctctttaacattcaagtcaaagaggtcacgcagaatgacggtacgacgacgattgccaataaccttaccagcacggttcaggtgtttactgactcggagtaccagctcccgtacgtcctcggctcggcgcatcaaggatgcctcccgccgtttccagcggacgtcttcatggtcccacagtatggatacctcaccctgaacaacgggagtcaggcggtaggacgctcttccttttactgcctggagtactttccttctcagatgctgcgtaccggaaacaactttaccttcagctacacctttgaggacgtgcccttccacagcagctacgctcacagccagagtttggaccggctgatgaatcctctgatcgaccagtatctgtattatctgaacaggacacaatcaaatagtggaactcttcagcagtctaggctactgtttagccaagctggacccaccagcatgtcccttcaagctaaaaactggctgcctggaccttgctacagacagcagcgtctgtcaaagcaggcaaacgacaacaacaacagcaactttccctggactgcggctacaaagtatcatctaaatggtcgggactcgttggttaatccaggaccagctatggccagccacaaagacgatgaagaaaagtttttccccatgcatggaaccctgatatttggtaaacaaggaacaaatgctaacgacgcggatttggaacatgtcatgattacagatgaagaagaaatcaggaccaccaatcccgtggctacagagcagtacggaaacgtgtcaaataatttgcaaaactcaaatactggtccaactacagaaaatgtcaatcaccagggagcgttacctggtatggtgtggcaggatcgagacgtgtacctgcagggacccatttgggccaagattcctcacaccgacggacactttcacccttctccactgatgggaggttttggactcaaacacccgcctcctcaaatcatgatcaaaaacactcctgttccagccaatcctcctacaaacttcagcgcggcaaagtttgcttccttcatcacacagtattccacgggacaggtcagcgtggagatcgagtgggagctgcagaaggagaacagcaaacgctggaaccccgagatccagtacacttccaactacaacaaatctgttaatgtggactttactgtggacgctaatggtgtgtattcagagcctcgccccattggcaccagatacctgactcgtaatctgtaa

SEQ ID NO: 3632 - DNA, 2208 bp, Artificial Sequence
  source: /note="Description of Artificial Sequence: Synthetic polynucleotide"
atggctgccgatggttatcttccagattggctcgaggacactctctctgaaggaataagacagtggtggaagctcaaacctggcccaccaccaccaaggcccgcagagcggcatcaggacgacagcaggggtcttgtgcttcctgggtacaagtacctcggacccttcaacggactcgacaaaggagagccggtcaacgaggcagacgctgcggccctcgagcacgacaaggcctacgaccggcagctcgacagcggagacaacccgtacctcaagtacaaccacgccgacgcggagtttcaggagcgtcttaaagaagatacgtcttttgggggcaacctcggacgagcagtcttccaggcgaaaaagagggttcttgaacctctgggcctggttgaggaacctgttaagacggctccgggaaaaaagaggccggtagagcactctcctgcggagccagactcctcctcgggaaccggaaaagcgggccagcagcctgcaagaaagagattgaatttcggtcagactggagacgcagactccgtacctgacccccagcctctcggacagccaccagcagcccccacaagtttgggatctactacaatggctacaggcagtggcgcaccaatggcagacaataacgagggtgccgatggagtgggtaattcctcagggaattggcattgcgattcccaatggttgggcgacagagtcatcaccaccagcacccgaacctgggccctgcccacctacaacaaccacctctacaagcaaatctccagccaatcaggagcagcgaacgacaaccactactttggctacagcaccccctgggggtattttgacttcaacagattccactgccacttttcaccacgtgactggcaaagactcatcaacaacaactggggattccgacccaagagactcaacttcaagctctttaacattcaagtcaaagaggtcacgcagaatgacggtacgacgacgattgccaataaccttaccagcacggttccggtgtttactgactcggagtaccagctcccgtacgtcctcggctcggcgcatcaaggatgcctcccgccgtttccagcggacgtcttcatggtcccacagtatggatacctcaccctgaacaacgggagtcaggcggtaggacgctcttccttttactgcctggagtactttccttctcagatgcttcgtaccggaaacaactttaccttcagttacacctttgaagacgttcctttccacagcagctacgctcacagtcaaagtctggaccggctgatgaatcctcttatcgaccagtacctgtattatctaaacaaaacacaatcaaatagtggaactcttcagcagtctcggctactgtttagtcaagctggacctaccagcatgtctcttcaagctaaaaactggctgcctggaccttgctacagacaacagcgtctgtcaaagcaggcaaacgacaacaacaacagcaactttccctggactgcggctacaaagtatcatctaaatggccgggactcgttggttaatccaggaccagctatggccagccacaaagacgatgaagaaaagtttttccccatgcatggaaccctgatatttggcaaacaagggacaaatgctaacgacgcggatttggacaatgtcatgattacagatgaagaagaaatccgtaccaccaatcccgtggctacggagcagtacgggactgtgtcaaataatttgcaaaactcaaatactggtccaactactggaactgtcaatcaccaaggagcgttacctggtatggtgtggcaggatcgagacgtgtaccttcagggacccatttgggccaagattcctcacaccgatggacactttcacccttctccgctgatgggaggttttggactcaaacacccgcctcctcagatcatgatcaaaaacactcccgttccagccaatcctcccacaaacttcagttctgccaagtttgcttctttcatcacacagtattccacgggacaggttagcgtggagatcgagtgggagctgcagaaggagaacagcaaacgctggaaccccgagatccagtacacttccaactacaacaagtctgttaatgtggactttactgtggacactaatggtgtgtattcagagcctcgccccattggcaccagatacctgactcgtaatctgtaa

SEQ ID NO: 3633 - DNA, 2208 bp, Artificial Sequence
  source: /note="Description of Artificial Sequence: Synthetic polynucleotide"
atggctgccgatggttatcttccagattggctcgaggacactctctctgaaggaataagacagtggtggaagctcaaacctggcccaccaccgccaaagcccgcagggcggcataaggacgacagcaggggtcttgtgcttcctgggtacaagtacctcggacccttcaacggactcgacaagggagagccggtcaacgaggcagacgccgcggccctcgagcacgacaaggcctacgaccggcagctcgacagcggagacaacccgtacctcaagtacaaccacgccggcgcggagtttcaggagcgccttaaagaagatacgtcttttgggggcaacctcggacgagcagtattccaggcgaaaaagagggttcttgaacctctgggcctggttgaggagcctgttaagacggctccgggaaaaaagaggccggtagagcactctcctgtggagccagactcctcctcgggaaccggaaaagcgggccagcagcctgcgaggaagagattgaattttggtcagactggagacgcagactccgtacctgacccccagcctctcggacagccaccagcagcccccacaagtttgggatctactacaatggctacaggcagtggcgcaccaatggcagacaataacgagggtgccgatggagtgggtaattcctcagggaattggcattgcgattcccaatggttgggcgacagagtcatcaccaccagcacccgaacctgggccctgcccacctacaacaaccacctctacaagcaaatctccagccaatcaggagcagcgaacgacaaccactactttggctacagcaccccctgggggtattttgacttcaacagattccactgccacttttcaccacgtgactggcaaagactcatcaacaacaactggggattccgacccaagagactcaacttcaagctctttaacattcaagtcaaagaggtcacgcagaatgacggtacgacgacgattgccaataaccttaccagcacggttccggtgtttactgactcggagtaccagctcccgtacgtcctcggctcggcgcatcaaggatgcctcccgccgtttccagcggacgtcttcatggtcccacagtatggatacctcaccctgaacaacgggagtcaggcggtaggacgctcttccttttactgcctggagtactttccttctcagatgcttcgtaccggaaacaactttaccttcagttacacctttgaagacgttcctttccacagcagctacgctcacagtcaaagtctggaccggctgatgaatcctcttatcgaccagtacctgtattatctaaacaaaacacaatcaaatagtggaactcttcagcagtctcggctactgtttagtcaagctggacctaccagcatgtctcttcaagctaaaaactggctgcctggaccttgctacagacaacagcgtctgtcaaagcaggcaaacgacaacaacaacagcaactttccctggactgcggctacaaagtatcatctaaatggccgggactcgttggttaatccaggaccagctatggccagccacaaagacgatgaagaaaagtttttccccatgcatggaaccctgatatttggcaaacaagggacaaatgctaacgacgcggatttggacaatgtcatgattacagatgaagaagaaatccgtaccaccaatcccgtggctacggagcagtacgggactgtgtcaaataatttgcaaaactcaaatactggtccaactactggaactgtcaatcaccaaggagcgttacctggtatggtgtggcaggatcgagacgtgtaccttcagggacccatttgggccaagattcctcacaccgatggacactttcacccttctccgctgatgggaggttttggactcaaacacccgcctcctcagatcatgatcaaaaacactcccgttccagccaatcctcccacaaacttcagttctgccaagtttgcttctttcatcacacagtattccacgggacaggttagcgtggagatcgagtgggagctgcagaaggagaacagcaaacgctggaaccccgagatccagtacacttccaactacaacaagtctgttaatgtggactttactgtggacactaatggtgtgtattcagagcctcgccccattggcaccagatacctgactcgtaatctgtaa

SEQ ID NO: 3634 - DNA, 2208 bp, Artificial Sequence
  source: /note="Description of Artificial Sequence: Synthetic polynucleotide"
atggctgccgatggttatcttccagattggctcgaggacactctctctgaaggaataagacagtggtggaagctcaaacctggcccaccaccaccaaggcccgcagagcggcatcaggacgacagcaggggtcttgtgcttcctgggtacaagtacctcggacccttcaacggactcgacaaaggagagccggtcaacgaggcagacgctgcggccctcgagcacgacaaggcctacgaccggcagctcgacagcggagacaacccgtacctcaagtacaaccacgccgacgcggagtttcaggagcgtcttaaagaagatacgtcttttgggggcaacctcggacgagcagtcttccaggcgaaaaagagggttcttgaacctctgggcctggttgaggaacctgttaagacggctccgggaaaaaagaggccggtagagcactctcctgcggagccagactcctcctcgggaaccggaaaagcgggccagcagcctgcaagaaagagattgaatttcggtcagactggagacgcagactccgtacctgacccccagcctctcggacagccaccagcagcccccacaagtttgggatctactacaatggctacaggcagtggcgcaccaatggcagacaataacgagggtgccgatggagtgggtaattcctcaggaaattggcattgcgattcccaatggctgggcgacagagtcatcaccaccagcacccgaacctgggccctgcccacctacaacaaccacctctacaagcaaatctccagccaatcaggagcatcgaacgacaaccactactttggctacagcacccctttggggtattttgacttcaacagattccactgtcacttctccccacgtgactggcaaagactcatcaacaacaactggggattccgacccaagagactcaacttcaagctctttaacattcaagtcaaagaggtcacgcagaatgacggtacgacgacgattgccaataaccttaccagcacggttcaggtgtttactgactcggagtaccagctcccgtacgtcctcggctcggcgcatcaaggatgcctcccgccgtttccagcggacgtcttcatggtcccacagtatggatacctcaccctgaacaacgggagtcaggcggtaggacgctcttccttttactgcctggagtactttccttctcagatgctgcgtaccggaaacaactttaccttcagctacacctttgaggacgtgcccttccacagcagctacgctcacagccagagtttggaccggctgatgaatcctctgatcgaccagtatctgtattatctgaacaggacacaatcaaatagtggaactcttcagcagtctaggctactgtttagccaagctggacccaccagcatgtcccttcaagctaaaaactggctgcctggaccttgctacagacagcagcgtctgtcaaagcaggcaaacgacaacaacaacagcaactttccctggactgcggctacaaagtatcatctaaatggtcgggactcgttggttaatccaggaccagctatggccagccacaaagacgatgaagaaaagtttttccccatgcatggaaccctgatatttggtaaacaaggaacaaatgctaacgacgcggatttggaacatgtcatgattacagatgaagaagaaatcaggaccaccaatcccgtggctacagagcagtacggaaacgtgtcaaataatttgcaaaactcaaatactggtccaactacagaaaatgtcaatcaccagggagcgttacctggtatggtgtggcaggatcgagacgtgtacctgcagggacccatttgggccaagattcctcacaccgacggacactttcacccttctccactgatgggaggttttggactcaaacacccgcctcctcaaatcatgatcaaaaacactcctgttccagccaatcctcctacaaacttcagcgcggcaaagtttgcttccttcatcacacagtattccacgggacaggtcagcgtggagatcgagtgggagctgcagaaggagaacagcaaacgctggaaccccgagatccagtacacttccaactacaacaaatctgttaatgtggactttactgtggacgctaatggtgtgtattcagagcctcgccccattggcaccagatacctgactcgtaatctgtaa

SEQ ID NO: 3635 - DNA, 2208 bp, Artificial Sequence
  source: /note="Description of Artificial Sequence: Synthetic polynucleotide"
atggctgccgatggttatcttccagattggctcgaggacactctctctgaaggaataagacagtggtggaagctcaaacctggcccaccaccgccaaagcccgcagggcggcataaggacgacagcaggggtcttgtgcttcctgggtacaagtacctcggacccttcaacggactcgacaagggagagccggtcaacgaggcagacgccgcggccctcgagcacgacaaggcctacgaccggcagctcgacagcggagacaacccgtacctcaagtacaaccacgccggcgcggagtttcaggagcgccttaaagaagatacgtcttttgggggcaacctcggacgagcagtattccaggcgaaaaagagggttcttgaacctctgggcctggttgaggagcctgttaagacggccccgggaaaaaagaggccggtagagcactctcctgtggagccagactcctcctcgggaaccggaaaagcgggccagcagcctgcgaggaagagattgaattttggtcagactggagacgcagactccgtacctgacccccagcctctcggacagccaccagcagcccccacaagtttgggatctactacaatggctacaggcagtggcgcaccaatggcagacaataacgagggtgccgatggagtgggtaattcctcagggaattggcattgcgattcccaatggttgggcgacagagtcatcaccaccagcacccgaacctgggccctgcccacctacaacaaccacctctacaagcaaatctccagccaatcaggagcagcgaacgacaaccactactttggctacagcaccccctgggggtattttgacttcaacagattccactgccacttttcaccacgtgactggcaaagactcatcaacaacaactggggattccgacccaagagactcaacttcaagctctttaacattcaagtcaaagaggtcacgcagaatgacggtacgacgacgattgccaataaccttaccagcacggttccggtgtttactgactcggagtaccagctcccgtacgtcctcggctcggcgcatcaaggatgcctcccgccgtttccagcggacgtcttcatggtcccacagtatggatacctcaccctgaacaacgggagtcaggcggtaggacgctcttccttttactgcctggagtactttccttctcagatgcttcgtaccggaaacaactttaccttcagttacacctttgaagacgttcctttccacagcagctacgctcacagtcaaagtctggaccggctgatgaatcctcttatcgaccagtatctgtattatctgaacaggacacaatcaaatagtggaactcttcagcagtctaggctactgtttagccaagctggacccaccagcatgtcccttcaagctaaaaactggctgcctggaccttgctacagacagcagcgtctgtcaaagcaggcaaacgacaacaacaacagcaactttccctggactgcggctacaaagtatcatctaaatggtcgggactcgttggttaatccaggaccagctatggccagccacaaagacgatgaagaaaagtttttccccatgcatggaaccctgatatttggtaaacaaggaacaaatgctaacgacgcggatttggaacatgtcatgattacagatgaagaagaaatcaggaccaccaatcccgtggctacagagcagtacggaaacgtgtcaaataatttgcaaaactcaaatactggtccaactacagaaaatgtcaatcaccagggagcgttacctggtatggtgtggcaggatcgagacgtgtacctgcagggacccatttgggccaagattcctcacaccgacggacactttcacccttctccactgatgggaggttttggactcaaacacccgcctcctcaaatcatgatcaaaaacactcctgttccagccaatcctcctacaaacttcagcgcggcaaagtttgcttccttcatcacacagtattccacgggacaggtcagcgtggagatcgagtgggagctgcagaaggagaacagcaaacgctggaaccccgagatccagtacacttccaactacaacaaatctgttaatgtggactttactgtggacgctaatggtgtgtattcagagcctcgccccattggcaccagatacctgactcgtaatctgtaa

SEQ ID NO: 3636 - DNA, 2208 bp, Artificial Sequence
  source: /note="Description of Artificial Sequence: Synthetic polynucleotide"
atggctgccgatggttatcttccagattggctcgaggacattctctctgaaggaataagacagtggtggaagctcaaacctggcccaccaccaccaaagcccgcagagcggcataaggacgacagcaggggtcttgtgcttcctgggtacaagtacctcggacccttcaacggactcgacaaaggagagccggtcaacgaggcagacgccgcggccctcgagcacgacaaggcctacgaccggcagctcgacagcggagacaacccgtacctcaagtacaaccacgccgacgcggagtttcaggagcgtcttaaagaagatacgtcttttgggggcaacctcggacgagcagtcttccaggcaaaaaagagggttcttgaacctctgggcctggttgaggaacctgttaagacggctccgggaaaaaagaggccggtagagcaatctcctgcggagccagactcctcctcgggaaccggaaaggcgggcaaccagcctgcaagaaagagattgaattttggtcagactggagacgcagactccgtacctgacccccagcctctcggacagccaccagcagccccctctggtctgggatctactacaatggctacaggcagtggcgcaccaatggcagacaataacgagggtgccgatggagtgggtaattcctcaggaaattggcattgcgattcccaatggttgggcgacagagtcatcaccaccagcacccgaacctgggccctgcccacctacaacaatcacctctacaagcaaatctccagccaatcaggagcagcgaacgacaaccactactttggctacagcaccccctgggggtattttgacttcaacagattccactgccacttttcaccacgtgactggcaaagactcatcaacaacaactggggattccgacccaagagactcaacttcaagctctttaacattcaagtcaaagaggtcacgcagaatgacggtacgacgacgattgccaataaccttaccagcacggttccggtgtttactgactcggagtaccagctcccgtacgtcctcggctcggcgcatcaaggatgcctcccgccgtttccagcggacgtcttcatggtcccacagtatggatacctcaccctgaacaacgggagtcaggcggtaggacgctcttccttttactgcctggagtactttccttctcagatgcttcgtaccggaaacaactttaccttcagttacacctttgaagacgttcctttccacagcagctacgctcacagtcaaagtctggaccggctgatgaatcctcttatcgaccagtacctgtattatctaaacaaaacacaatcaaatagtggaactcttcagcagtctcggctactgtttagtcaagctggacctaccagcatgtctcttcaagctaaaaactggctgcctggaccttgctacagacaacagcgtctgtcaaagcaggcaaacgacaacaacaacagcaactttccctggactgcggctacaaagtatcatctaaatggccgggactcgttggttaatccaggaccagctatggccagccacaaagacgatgaagaaaagtttttccccatgcatggaaccctgatatttggcaaacaagggacaaatgctaacgacgcggatttggacaatgtcatgattacagatgaagaagaaatccgtaccaccaatcccgtggctacggagcagtacgggactgtgtcaaataatttgcaaaactcaaatactggtccaactactggaactgtcaatcaccaaggagcgttacctggtatggtgtggcaggatcgagacgtgtaccttcagggacccatttgggccaagattcctcacaccgatggacactttcacccttctccgctgatgggaggttttggactcaaacacccgcctcctcagatcatgatcaaaaacactcccgttccagccaatcctcccacaaacttcagttctgccaagtttgcttctttcatcacacagtattccacgggacaggttagcgtggagatcgagtgggagctgcagaaggagaacagcaaacgctggaaccccgagatccagtacacttccaactacaacaagtctgttaatgtggactttactgtggacactaatggtgtgtattcagagcctcgccccattggcaccagatacctgactcgtaatctgtaa

SEQ ID NO: 3637 - DNA, 2208 bp, Artificial Sequence
  source: /note="Description of Artificial Sequence: Synthetic polynucleotide"
atggctgccgatggttatcttccagattggctcgaggacactctctctgaaggaataagacagtggtggaagctcaaacctggcccaccaccaccaaggcccgcagagcggcatcaggacgacagcaggggtcttgtgcttcctgggtacaagtacctcggacccttcaacggactcgacaaaggagagccggtcaacgaggcagacgctgcggccctcgagcacgacaaggcctacgaccggcagctcgacagcggagacaacccgtacctcaagtacaaccacgccgacgcggagtttcaggagcgtcttaaagaagatacgtcttttgggggcaacctcggacgagcagtcttccaggcgaaaaagagggttcttgaacctctgggcctggttgaggaacctgttaagacggctccgggaaaaaagaggccggtagagcactctcctgcggagccagactcctcctcgggaaccggaaaagcgggccagcagcctgcaagaaagagattgaatttcggtcagactggagacgcagactccgtacctgacccccagcctctcggacagccaccagcagcccccacaagtttgggatctactacaatggctacaggcagtggcgcaccaatggcagacaataacgagggtgccgatggagtgggtaattcctcaggaaattggcattgcgattcccaatggctgggcgacagagtcatcaccaccagcacccgaacctgggccctgcccacctacaacaaccacctctacaagcaaatctccagccaatcaggagcatcgaacgacaaccactactttggctacagcaccccttgggggtattttgacttcaacagattccactgtcacttctccccacgtgactggcaaagactcatcaacaacaactggggattccgacccaagagactcaacttcaagctctttaacattcaagtcaaagaggtcacgcagaatgacggtacgacgacgattgccaataaccttaccagcacggttcaggtgtttactgactcggagtaccagctcccgtacgtcctcggctcggcgcatcaaggatgcctcccgccgtttccagcggacgtcttcatggtcccacagtatggatacctcaccctgaacaacgggagtcaggcggtaggacgctcttccttttactgcctggagtactttccttctcagatgctgcgtaccggaaacaactttaccttcagctacacctttgaggacgtgcccttccacagcagctacgctcacagccagagtttggaccggctgatgaatcctctgatcgaccagtatctgtattatctgaacaggacacaatcaaatagtggaactcttcagcagtctaggctactgtttagccaagctggacccaccagcatgtcccttcaagctaaaaactggctgcctggaccttgctacagacagcagcgtctgtcaaagcaggcaaacgacaacaacaacagcaactttccctggactgcggctacaaagtatcatctaaatggtcgggactcgttggttaatccaggaccagctatggccagccacaaagacgatgaagaaaagtttttccccatgcatggaaccctgatatttggtaaacaaggaacaaatgctaacgacgcggatttggaacatgtcatgattacagatgaagaagaaatcaggaccaccaatcccgtggctacagagcagtacggaaacgtgtcaaataatttgcaaaactcaaatactggtccaactacagaaaatgtcaatcaccagggagcgttacctggtatggtgtggcaggatcgagacgtgtacctgcagggacccatttgggccaagattcctcacaccgacggacactttcacccttctccactgatgggaggttttggactcaaacacccgcctcctcaaatcatgatcaaaaacactcctgttccagccaatcctcctacaaacttcagcgcggcaaagtttgcttccttcatcacacagtattccacgggacaggtcagcgtggagatcgagtgggagctgcagaaggagaacagcaaacgctggaaccccgagatccagtacacttccaactacaacaaatctgttaatgtggactttactgtggacgctaatggtgtgtattcagagcctcgccccattggcaccagatacctgactcgtaatctgtaa

SEQ ID NO: 3638 - DNA, 2208 bp, Artificial Sequence
  source: /note="Description of Artificial Sequence: Synthetic polynucleotide"
atggctgccgatggttatcttccagattggctcgaggacactctctctgaaggaataagacagtggtggaagctcaaacctggcccaccaccgccaaagcccgcagggcggcataaggacgacagcaggggtcttgtgcttcctgggtacaagtacctcggacccttcaacggactcgacaagggagagccggtcaacgaggcagacgccgcggccctcgagcacgacaaggcctacgaccggcagctcgacagcggagacaacccgtacctcaagtacaaccacgccggcgcggagtttcaggagcgccttaaagaagatacgtcttttgggggcaacctcggacgagcagtattccaggcgaaaaagagggttcttgaacctctgggcctggttgaggagcctgttaagacggctccgggaaaaaagaggccggtagagcactctcctgtggagccagactcctcctcgggaaccggaaaagcgggccagcagcctgcgagaaagagattgaatttcggtcagactggagacgcagactccgtacctgacccccagcctctcggacagccaccagcagcccccacaagtttgggatctactacaatggctacaggcagtggcgcaccaatggcagacaataacgagggtgccgatggagtgggtaattcctcaggaaattggcattgcgattcccaatggctgggcgacagagtcatcaccaccagcacccgaacctgggccctgcccacctacaacaaccacctctataagcaaatctccagccaatcaggagcatcgaacgacaaccactactttggctacagcaccccttgggggtattttgacttcaacagattccactgtcacttctccccacgtgactggcaaagactcatcaacaacaactggggattccgacccaagagactcaacttcaagctctttaacattcaagtcaaagaggtcacgcagaatgacggtacgacgacgattgccaataaccttaccagcacggttcaggtgtttactgactcggagtaccagctcccgtacgtcctcggctcggcgcatcaaggatgcctcccgccgtttccagcggacgtcttcatggtcccacagtatggatacctcaccctgaacaacgggagtcaggcggtaggacactcttccycttactgcctggagtactttccttctcagatgctgcgtaccggaaacaactttaccttcagctacacctttgaggacgtgcctttccacagcagctacgctcacagccagagtttggaccggctgatgaatcctctgatcgaccagtatctgtattatctgaacaggacacaatcaaatagtggaactcttcagcagtctaggctactgtttagccaagctggacccaccagcatgtctcttcaagctaaaaactggctgcctggaccttgctacagacagcagcgtctgtcaaagcaggcaaacgacaacaacaacagcaactttccctggactgcggctacaaagtatcatctaaatggtcgggactcgttggttaatccaggaccagctatggccagccacaaagacgatgaagaaaagtttttccccatgcatggaaccctgatatttggtaaacaaggaacaaatgctaacgacgcggatttggaacatgtcatgattacagatgaagaagaaatcaggaccaccaatcccgtggctacagagcagtacggaaacgtgtcaaataatttgcaaaactcaaatactggtccaactacagaaaatgtcaatcaccagggagcgttacctggtatggtgtggcaggatcgagacgtgtacctgcagggacccatttgggccaagattcctcacaccgacggacactttcacccttctccactgatgggaggttttggactcaaacacccgcctcctcaaatcatgatcaaaaacactcctgttccagccaatcctcctacaaacttcagcgcggcaaagtttgcttccttcatcacacagtattccacgggacaggtcagcgtggagatcgagtgggagctgcagaaggagaacagcaaacgctggaaccccgagatccagtacacttccaactacaacaaatctgttaatgtggactttactgtagacactaatggtgtgtattcagagcctcgccccattggcaccagatacctgactcgtaatctgtaa

SEQ ID NO: 3639 - DNA, 2208 bp, Artificial Sequence
  source: /note="Description of Artificial Sequence: Synthetic polynucleotide"
atggctgccgatggttatcttccagattggctcgaggacactctctctgaaggaataagacagtggtggaagctcaaacctggcccaccaccgccaaagcccgcagagcggcatmaggacgacagcaggggtcttgtgcttcctgggtacaagtacctcggacccttcaacggactcgacaaaggagagccggtcaacgaggcagacgctgcggccctcgagcacgacaaggcctacgaccggcagctcgacagcggagacaacccgtacctcaagtacaaccacgccgacgcggagtttcaggagcgtcttaaagaagatacgtcttttgggggcaacctcggacgagcagtcttccaggcgaaaaagagggttcttgaacctctgggcctggttgaggaacctgttaagacggctccgggaaaaaagaggccggtagagcactctcctgcggagccagactcctcctcgggaaccggaaaagcgggccagcagcctgcaagaaagagattgaatttcggtcagactggagacgcagactccgtacctgacccccagcctctcggacagccaccagcagcccccacaagtttgggatctactacaatggctacaggcagtggcgcaccaatggcagacaataacgagggtgccgatggagtgggtaattcctcaggaaattggcattgcgattcccaatggctgggcgacagagtcatcaccaccagcacccgaacctgggccctgcccacctacaacaaccacctctacaagcaaatctccagccaatcaggagcatcgaacgacaaccactactttggctacagcaccccttgggggtattttgacttcaacagattccactgtcacttctccccacgtgactggcaaagactcatcaacaacaactggggattccgacccaagagactcaacttcaagctctttaacattcaagtcaaagaggtcacgcagaatgacggtacgacgacgattgccaataaccttaccagcacggttcaggtgtttactgactcggagtaccagctcccgtacgtcctcggctcggcgcatcaaggatgcctcccgccgtttccagcggacgtcttcatggtcccacagtatggatacctcaccctgaacaacgggagtcaggcggtaggacgctcttccttttactgcctggagtactttccttctcagatgctgcgtaccggaaacaactttaccttcagctacacctttgaggacgtgcccttccacagcagctacgctcacagccagagtttggaccggctgatgaatcctctgatcgaccagtatctgtattatctgaacaggacacaatcaaatagtggaactcttcagcagtctaggctactgtttagccaagctggacccaccagcatgtcccttcaagctaaaaactggctgcctggaccttgctacagacagcagcgtctgtcaaagcaggcaaacgacaacaacaacagcaactttccctggactgcggctacaaagtatcatctaaatggtcgggactcgttggttaatccaggaccagctatggccagccacaaagacgatgaagaaaagtttttccccatgcatggaaccctgatatttggtaaacaaggaacaaatgctaacgacgcggatttggaacatgtcatgattacagatgaagaagaaatcaggaccaccaatcccgtggctacagagcagtacggaaacgtgtcaaataatttgcaaaactcaaatactggtccaactacagaaaatgtcaatcaccagggagcgttacctggtatggtgtggcaggatcgagacgtgtacctgcagggacccatttgggccaagattcctcacaccgacggacactttcacccttctccactgatgggaggttttggactcaaacacccgcctcctcaaatcatgatcaaaaacactcctgttccagccaatcctcctacaaacttcagcgcggcaaagtttgcttccttcatcacacagtattccacgggacaggtcagcgtggagatcgagtgggagctgcagaaggagaacagcaaacgctggaaccccgagatccagtacacttccaactacaacaaatctgttaatgtggactttactgtagacactaatggtgtgtattcagagcctcgccccattggcaccagatacctgactcgtaatctgtaa

SEQ ID NO: 3640 - DNA, 2208 bp, Artificial Sequence
  source: /note="Description of Artificial Sequence: Synthetic polynucleotide"
atggctgccgatggttatcttccagattggctcgaggacactctctctgaaggaataagacagtggtggaagctcaaacctggcccaccaccaccaaagcccgcagagcggcatcaggacgacagcaggggtcttgtgcttcccgggcacaagtacctcggacccttcaacggactcgacaaaggagagccggtcaacgaggcagacgctgcggccctcgagcacgacaaggcctacgaccggcagctcgacagcggagacaacccgtacctcaagtacaaccacgccgacgcggagtttcaggagcgtcttaaagaagatacgtcttttgggggcaacctcggacgagcagtcttccaggcgaaaaagagggttcttgaacctctgggcctggttgaggaacctgttaagacggctccgggaaaaaagaggccggtagagcactctcctgcggagccagactcctcctcgggaaccggaaaagcgggccagcagcctgcaagaaagagattgaatttcggtcagactggagacgcagactccgtacctgacccccagcctctcggacagccaccagcagcccccacaagtttgggatctactacaatggctacaggcagtggcgcaccaatggcagacaataacgagggtgccgatggagtgggtaattcctcaggaaattggcattgcgattcccaatggctgggcgacagagtcatcaccaccagcacccgaacctgggccctgcccacctacaacaaccacctctataagcaaatctccagccaatcaggagcatcgaacgacaaccactactttggctacagcaccccttgggggtattttgacttcaacagattccactgtcacttctccccacgtgactggcaaagactcatcaacaacaactggggattccgacccaagagactcaacttcaagctctttaacattcaagtcaaagaggtcacgcagaatgacggtacgacgacgattgccaataaccttaccagcacggttcaggtgtttactgactcggagtaccagctcccgtacgtcctcggctcggcgcatcaaggatgcctcccgccgtttccagcggacgtcttcatggtcccacagtatggatacctcaccctgaacaacgggagtcaggcggtaggacactcttcctcttactgcctggagtactttccttctcagatgctgcgtaccggaaacaactttaccttcagctacacctttgaggacgtgcctttccacagcagctacgctcacagccagagtttggaccggctgatgaatcctctgatcgaccagtatctgtattatctgaacaggacacaatcaaatagtggaactcttcagcagtctaggctactgtttagccaagctggacccaccagcatgtctcttcaagctaaaaactggctgcctggaccttgctacagacagcagcgtctgtcaaagcaggcaaacgacaacaacaacagcaactttccctggactgcggctacaaagtatcatctaaatggtcgggactcgttggttaatccaggaccagctatggccagccacaaagacgatgaagaaaagtttttccccatgcatggaaccctgatatttggtaaacaaggaacaaatgctaacgacgcggatttggaacatgtcatgattacagatgaagaagaaatcaggaccaccaatcccgtggctacagagcagtacggaaacgtgtcaaataatttgcaaaactcaaatactggtccaactacagaaaatgtcaatcaccagggagcgttacctggtatggtgtggcaggatcgagacgtgtacctgcagggacccatttgggccaagattcctcacaccgacggacactttcacccttctccactgatgggaggatttggactgaagcaccctcccccgcagattctcatcaagaataccccggtacctgcgaatccttctaccaccttcagcgcggcaaagtttgcttccttcatcacacagtactccacggggcaggtcagcgtggagatcgagtgggagctgcagaaagagaacagcaaacgctggaaccccgagatccagtatacctccaactacaacaagtctgttaatgtggactttactgtggacactaatggcgtgtattcagagcctcgccccattggcacaagatacctgactcgtaatctgtaa

SEQ ID NO: 3641 - DNA, 2208 bp, Artificial Sequence
  source: /note="Description of Artificial Sequence: Synthetic polynucleotide"
atggctgccgatggttatcttccagattggctcgaggacactctctctgaaggaataagacagtggtggaagctcaaacctggcccaccaccgccaaagcccgcagagcggcataaggacgacagcaggggtcttgtgcttcctgggtacaagtacctcggacccttcaacggactcgacaaaggagagccggtcaacgaggcagacgccgcggccctcgagcacgacaaggcctacgaccggcagctcgacagcggagacaacccgtacctcaagtacaaccacgccgacgcggagtttcaggagcgccttaaagaagatacgtcttttgggggcaacctcgcaagagcagtattccaggcgaaaaagagggttcttgaacctctgggcctggttgaggagcctgttaagacggctccgggaaaaaagaggccggtagagcactctcctgcggagccagattcctcctccggaactggaaagtcgggccaacagcctgcaagaaagagattgaattttggtcagactggagacgcagactccgtacctgacccccagcctctcggacagccaccagcagccccctctggtctgggaactaatacgatggcttcaggcagtggcgcaccaatggcagacaataacgagggcgccgacggagtgggtaattcctcgggaaattggcattgcgattccacatggatgggcgacagagtcatcaccaccagcacccgaacctgggccctgcccacctacaacaaccacctctacaagcaaatctccagccaatcaggagcatcgaacgacaaccactactttggctacagcaccccttgggggtattttgacttcaacagattccactgtcacttctccccacgtgactggcaaagactcatcaacaacaactggggattccgacccaagagactcaacttcaagctctttaacattcaagtcaaagaggtcacgcagaatgacggtacgacgacgattgccaataaccttaccagcacggttcaggtgtttactgactcggagtaccagctcccgtacgtcctcggctcggcgcatcaaggatgcctcccgccgtttccagcggacgtcttcatggtcccacagtatggatacctcaccctgaacaacgggagtcaggcggtaggacgctcttccttttactgcctggagtactttccttctcagatgctgcgtaccggaaacaactttaccttcagctacacctttgaggacgtgcccttccacagcagctacgctcacagccagagtttggaccggctgatgaatcctctgatcgaccagtatctgtattatctgaacaggacacaatcaaatagtggaactcttcagcagtctaggctactgtttagccaagctggacccaccagcatgtcccttcaagctaaaaactggctgcctggaccttgctacagacagcagcgtctgtcaaagcaggcaaacgacaacaacaacagcaactttccctggactgcggctacaaagtatcatctaaatggtcgggactcgttggttaatccaggaccagctatggccagccacaaagacgatgaagaaaagtttttccccatgcatggaaccctgatatttggtaaacaaggaacaaatgctaacgacgcggatttggaacatgtcatgattacagatgaagaagaaatcaggaccaccaatcccgtggctacagagcagtacggaaacgtgtcaaataatttgcaaaactcaaatactggtccaactacagaaaatgtcaatcaccagggagcgttacctggtatggtgtggcaggatcgagacgtgtacctgcagggacccatttgggccaagattcctcacaccgacggacactttcacccttctccactgatgggaggttttggactcaaacacccgcctcctcaaatcatgatcaaaaacactcctgttccagccaatcctcctacaaacttcagcgcggcaaagtttgcttccttcatcacacagtattccacgggacaggtcagcgtggagatcgagtgggagctgcagaaggagaacagcaaacgctggaaccccgagatccagtacacttccaactacaacaaatctgttaatgtggactttactgtggacgctaatggtgtgtattcagagcctcgccccattggcaccagatacctgactcgtaatctgtaa

SEQ ID NO: 3642 - DNA, 2208 bp, Artificial Sequence
  source: /note="Description of Artificial Sequence: Synthetic polynucleotide"
atggctgccgatggttatcttccagattggctcgaggacattctctctgaaggaataagacagtggtggaagctcaaacctggcccaccaccaccaaagcccgcagagcggcataaggacgacagcaggggtcttgtgcttcctgggtacaagtacctcggacccttcaacggactcgacaaaggagagccggtcaacgaggcagacgccgcggccctcgagcacgacaaggcctacgaccggcagctcgacagcggagacaacccgtacctcaagtacaaccacgccgacgcggagtttcaggagcgtcttaaagaagatacgtcttttgggggcaacctcggacgagcagtcttccaggcgaaaaagagggttcttgaacctctgggcctggttgaggaacctgttaagacggctccgggaaaaaagaggccggtagagcaatctcctgcggagccagactcctcctcgggaaccggaaaggcgggcaaccagcctgcaagaaagagattgaattttggtcagactggagacgcagactccgtacctgacccccagcctctcggacagccaccagcagccccctctggtctgggatctactacaatggctacaggcagtggcgcaccaatggcagacaataacgagggtgccgatggagtgggtaattcctcaggaaattggcattgcgattcccaatggttgggcgacagagtcatcaccaccagcacccgaacctgggccctgcccacctacaacaatcacctctacaagcaaatctccagccaatcaggagcagcgaacgacaaccactactttggctacagcaccccctgggggtattttgacttcaacagattccactgccacttttcaccacgtgactggcaaagactcatcaacaacaactggggattccgacccaaragactcaacttcaagctctttaacattcaagtcaaagaggtcacgcagaatgacggtacgacgacgattgccaataaccttaccagcacggttcaggtgtttactgactcggagtaccagctcccgtacgtcctcggctcggcgcatcaaggatgcctcccgccgtttccagcggacgtcttcatggtcccacagtatggatacctcaccctgaacaacgggagtcaggcggtaggacgctcttccttttactgcctggagtactttccttctcagatgctgcgtaccggaaacaactttaccttcagctacacctttgaggacgtgcccttccacagcagctacgctcacagccagagtttggaccggctgatgaatcctctgatcgaccagtatctgtattatctgaacaggacacaatcaaatagtggaactcttcagcagtctaggctactgtttagccaagctggacccaccagcatgtcccttcaagctaaaaactggctgcctggaccttgctacagacagcagcgtctgtcaaagcaggcaaacgacaacaacaacagcaactttccctggactgcggctacaaagtatcatctaaatggtcgggactcgttggttaatccaggaccagctatggccagccacaaagacgatgaagaaaagtttttccccatgcatggaaccctgatatttggtaaacaaggaacaaatgctaacgacgcggatttggaacatgtcatgattacagatgaagaagaaatcaggaccaccaatcccgtggctacagagcagtacggaaacgtgtcaaataatttgcaaaactcaaatactggtccaactacagaaaatgtcaatcaccagggagcgttacctggtatggtgtggcaggatcgagacgtgtacctgcagggacccatttgggccaagattcctcacaccgacggacactttcacccttctccactgatgggaggttttggactcaaacacccgcctcctcaaatcatgatcaaaaacactcctgttccagccaatcctcctacaaacttcagcgcggcaaagtttgcttccttcatcacacagtattccacgggacaggtcagcgtggagatcgagtgggagctgcagaaggagaacagcaaacgctggaaccccgagatccagtacacttccaactacaacaaatctgttaatgtggactttactgtggacgctaatggtgtgtattcagagcctcgccccattggcaccagatacctgactcgtaatctgtaa

SEQ ID NO: 3643 - DNA, 2208 bp, Artificial Sequence
  source: /note="Description of Artificial Sequence: Synthetic polynucleotide"
atggctgccgatggttatcttccagattggctcgaggacactctctctgaaggaataagacagtggtggaagctcaaacctggcccaccaccaccaaggcccgcagagcggcatcaggacgacagcaggggtcttgtgcttcctgggtacaagtacctcggacccttcaacggactcgacaaaggagagccggtcaacgaggcagacgctgcggccctcgagcacgacaaggcctacgaccggcagctcgacagcggagacaacccgtacctcaagtacaaccacgccgacgcggagtttcaggagcgtcttaaagaagatacgtcttttgggggcaacctcggacgagcagtcttccaggcgaaaaagagggttcttgaacctctgggcctggttgaggaacctgttaagacggctccgggaaaaaagaggccggtagagcactctcctgcggagccagactcctcctcgggaaccggaaaagcgggccagcagcctgcaagaaagagattgaatttcggtcagactggagacgcagactccgtacctgacccccagcctctcggacagccaccagcagcccccacaagtttgggatctactacaatggctacaggcagtggcgcaccaatggcagacaataacgagggtgccgatggagtgggtaattcctcaggaaattggcattgcgattcccaatggctgggcgacagagtcatcaccaccagcacccgaacctgggccctgcccacctacaacaaccacctctacaagcaaatctccagccaatcaggagcatcgaacgacaaccactactttggctacagcaccccttgggggtattttgacttcaacagattccactgtcacttctccccacgtgactggcaaagactcatcaacaacaactggggattccgacccaagagactcaacttcaagctctttaacattcaagtcaaagaggtcacgcagaatgacggtacgacgacgattgccaataaccttaccagcacggttcaggtgtttactgactcggagtaccagctcccgtacgtcctcggctcggcgcatcaaggatgcctcccgccgtttccagcggacgtcttcatggtcccacagtatggatacctcaccctgaacaacgggagtcaggcggtaggacgctcttccttttactgcctggagtactttccttctcagatgctgcgtaccggaaacaactttaccttcagctacacctttgaggacgtgcccttccacagcagctacgctcacagccagagtttggaccggctgatgaatcctctgatcgaccagtatctgtattatctgaacaggacacaatcaaatagtggaactcttcagcagtctaggctactgtttagccaagctggacccaccagcatgtcccttcaagctaaaaactggctgcctggaccttgctacagacagcagcgtctgtcaaagcaggcaaacgacaacaacaacagcaactttccctggactgcggctacaaagtatcatctaaatggtcgggactcgttggttaatccaggaccagctatggccagccacaaagacgatgaagaaaagtttttccccatgcatggaaccctgatatttggtaaacaaggaacaaatgctaacgacgcggatttggaacatgtcatgattacagatgaagaagaaatcaggaccaccaatcccgtggctacagagcagtacggaaacgtgtcaaataatttgcaaaactcaaatactggtccaactacagaaaatgtcaatcaccagggagcgttacctggtatggtgtggcaggatcgagacgtgtacctgcagggacccatttgggccaagattcctcacaccgacggacactttcacccttctcctcttatgggaggatttggactgaagcaccctcccccgcagattctcatcaagagtaccccggtacctgcgaatccttctaccaccttcagcgcggcaaagtttgcttccttcatcacacagtactccacggggcaggtcagcgtggagatcgagtgggagctgcagaaagagaacagcaaacgctggaaccccgagatccagtatacctccaactacaacaagtctgttaatgtggactttactgtggacactaatggcgtgtattcagagcctcgccccattggcacaagatacctgactcgtaatctgtaa

SEQ ID NO: 3644 - DNA, 2208 bp, Artificial Sequence
  source: /note="Description of Artificial Sequence: Synthetic polynucleotide"
atggctgccgatggttatcttccagattggctcgaggacactctctctgaaggaataagacagtggtggaagctcaaacctggcccaccaccaccaaggcccgcagagcggcatcaggacgacagcaggggtcttgtgcttcctgggtacaagtacctcggacccttcaacggactcgacaaaggagagccggtcaacgaggcagacgctgcggccctcgagcacgacaaggcctacgaccggcagctcgacagcggagacaacccgtacctcaagtacaaccacgccgacgcggagtttcaggagcgtcttaaagaagatacgtcttttgggggcaacctcggacgagcagtcttccaggcgaaaaagagggttcttgaacctctgggcctggttgaggaacctgttaagacggctccgggaaaaaagaggccggtagagcactctcctgcggagccagactcctcctcgggaaccggaaaagcgggccagcagcctgcaagaaagagattgaatttcggtcagactggagacgcagactccgtacctgacccccagcctctcggacagccaccagcagcccccacaagtttgggatctactacaatggctacaggcagtggcgcaccaatggcagacaataacgagggtgccgatggagtgggtaattcctcaggaaattggcattgcgattcccaatggctgggcgacagagtcatcaccaccagcacccgaacctgggccctgcccacctacaacaaccacctctacaagcaaatctccagccaatcaggagcatcgaacgacaaccactactttggctacagcaccccttgggggtattttgacttcaacagattccactgtcacttctccccacgtgactggcaaagactcaccaacaacaactggggattccgacccaagagactcaacttcaagctctttaacattcaagtcaaagaggtcacgcagaatgacggtacgacgacgattgccaataaccttaccagcacggttcaggtgtttactgactcggagtaccagctcccgtacgtcctcggctcggcgcatcaaggatgcctcccgccgtttccagcggacgtcttcatggtcccacagtatggatacctcaccctgaacaacgggagtcaggcggtaggacgctcttccttttactgcctggagtactttccttctcagatgctgcgtaccggaaacaactttaccttcagctacacctttgaggacgtgcccttccacagcagctacgctcacagccagagtttggaccggctgatgaatcctctgatcgaccagtatctgtattatctgaacaggacacaatcaaatagtggaactcttcagcagtctaggctactgtttagccaagctggacccaccagcatgtcccttcaagctaaaaactggctgcctggaccttgctacagacagcagcgtctgtcaaagcaggcaaacgacaacaacaacagcaactttccctggactgcggctacaaagtatcatctaaatggtcgggactcgttggttaatccaggaccagctatggccagccacaaagacgatgaagaaaagtttttccccatgcatggaaccctgatatttggtaaacaaggaacaaatgctaacgacgcggatttggaacatgtcatgattacagatgaagaagaaatcaggaccaccaatcccgtggctacagagcagtacggaaacgtgtcaaataatttgcaaaactcaaatactggtccaactacagaaaatgtcaatcaccagggagcgttacctggtatggtgtggcaggatcgagacgtgtacctgcagggacccatttgggccaagattcctcacaccgacggacactttcacccttctccactgatgggaggttttggactcaaacacccgcctcctcaaatcatgatcaaaaacactcctgttccagccaatcctcctacaaacttcagcgcggcaaagtttgcttccttcatcacacagtattccacgggacaggtcagcgtggagatcgagtgggagctgcagaaggagaacagcaaacgctggaaccccgagatccagtacacttccaactacaacaaatctgttaatgtggactttactgtggacgctaatggtgtgtattcagagcctcgccccattggcaccagatacctgactcgtaatctgtaa

SEQ ID NO: 3645 - DNA, 2208 bp, Artificial Sequence
  source: /note="Description of Artificial Sequence: Synthetic polynucleotide"
atggctgccgatggttatcttccagattggctcgaggacactctctctgaaggaataagacagtggtggaagctcaaacctggcccaccaccgccaaagcccgcagggcggcataaggacgacagcaggggtcttgtgcttcctgggtacaagtacctcggacccttcaacggactcgacaagggagagccggtcaacgaggcagacgccgcggccctcgagcacgacaaggcctacgaccggcagctcgacagcggagacaacccgtacctcaagtacaaccacgccggcgcggagtttcaggagcgccttaaagaagatacgtcttttgggggcaacctcggacgagcagtattccaggcgaaaaagagggttcttgaacctctgggcctggttgaggagcctgttaagacggccccgggaaaaaagaggccggtagagcactctcctgtggagccagactcctcctcgggaaccggaaaagcgggccagcagcctgcgaggaagagattgaattttggtcagactggagacgcagactccgtacctgacccccagcctctcggacagccaccagcagcccccacaagtttgggatctactacaatggctacaggcagtggcgcaccaatggcagacaataacgagggtgccgatggagtgggtaattcctcagggaattggcattgcgattcccaatggttgggcgacagagtcatcaccaccagcacccgaacctgggccctgcccacctacaacaaccacctctacaagcaaatctccagccaatcaggagccagcaacgacaaccactactttggctacagcaccccctgggggtattttgacttcaacagattccactgccacttttcaccacgtgactggcaaagactcatcaacaacaactggggattccgacccaagagactcaacttcaagctctttaacattcaagtcaaagaggtcacgcagaatgacggtacgacgacgattgccaataaccttaccagcacggttccggtgtttactgactcggagtaccagctcccgtacgtcctcggctcggcgcatcaaggatgcctcccgccgtttccagcggacgtcttcatggtcccacagtatggatacctcaccctgaacaacgggagtcaggcggtaggacgctcttccttttactgcctggagtactttccttctcagatgcttcgtaccggaaacaactttaccttcagttacacctttgaagacgttcctttccacagcagctacgctcacagtcaaagtctggaccggctgatgaatcctcttatcgaccagtacctgtattatctaaacaaaacacaatcaaatagtggaactcttcagcagtctcggctactgtttagtcaagctggacctaccagcatgtctcttcaagctaaaaactggctgcctggaccttgctacagacaacagcgtctgtcaaagcaggcaaacgacaacaacaacagcaactttccctggactgcggctacaaagtatcatctaaatggccgggactcgttggttaatccaggaccagctatggccagccacaaagacgatgaagaaaagtttttccccatgcatggaaccctgatatttggcaaacaagggacaaatgctaacgacgcggatttggacaatgtcatgattacagatgaagaagaaatccgtaccaccaatcccgtggctacggagcagtacgggactgtgtcaaataatttgcaaaactcaaatactggtccaactactggaactgtcaatcaccaaagagcgttacctggtatggtgtggcaggatcgagacgtgtaccttcagggacccatttgggccaagattcctcacaccgatggacactttcacccttctccgctgatgggaggttttggactcaaacacccgcctcctcagatcatgatcaaaaacactcccgttccagccaatcctcccacaaacttcagttctgccaagtttgcttctttcatcacacagtattccacgggacaggttagcgtggagatcgagtgggagctgcagaaggagaacagcaaacgctggaaccccgagatccagtacacttccaactacaacaagtctgttaatgtggactttactgtggacactaatggtgtgtattcagagcctcgccccattggcaccagatacctgactcgtaatctgtaa

SEQ ID NO: 3646 - DNA, 2208 bp, Artificial Sequence
  source: /note="Description of Artificial Sequence: Synthetic polynucleotide"
atggctgccgatggttatcttccagattggctcgaggacactctctctgaaggaataagacagtggtggaagctcaaacctggcccaccaccgccaaagcccgcagggcggcataaggacgacagcaggggtcttgtgcttcctgggtacaagtacctcggacccttcaacggactcgacaagggagagccggtcaacgaggcagacgccgcggccctcgagcacgacaaggcctacgaccggcagctcgacagcggagacaacccgtacctcaagtacaaccacgccggcgcggagtttcaggagcgccttaaagaagatacgtcttttgggggcaacctcggacgagcagtattccaggcgaaaaagagggttcttgaacctctgggcctggttgaggagcctgttaagacggccccgggaaaaaagaggccggtagagcactctcctgtggagccagactcctcctcgggaaccggaaaagcgggccagcagcctgcgaggaagagattgaattttggtcagactggagacgcagactccgtacctgacccccagcctctcggacagccaccagcagcccccacaagtttgggatctactacaatggctacaggcagtggcgcaccaatggcagacaataacgagggtgccgatggagtgggtaattcctcagggaattggcattgcgattcccaatggttgggcgacagagtcatcaccaccagcacccgaacctgggccctgcccacctacaacaaccacctctacaagcaaatctccagccaatcaggagccagcaacgacaaccactactttggctacagcaccccctgggggtattttgacttcaacagattccactgccacttttcaccacgtgactggcaaagactcatcaacaacaactggggattccgacccaagagactcaacttcaagctctttaacattcaagtcaaagaggtcacgcagaatgacggtacgacgacgattgccaataaccttaccagcacggttccggtgtttactgactcggagtaccagctcccgtacgtcctcggctcggcgcatcaaggatgcctcccgccgtttccagcggacgtcttcatggtcccacagtatggatacctcaccctgaacaacgggagtcaggcggtaggacgctcttccttttactgcctggagcactttccttctcagatgcttcgtaccggaaacaactttaccttcagttacacctttgaagacgttcctttccacagcagctacgctcacagtcaaagtctggaccggctgatgaatcctcttatcgaccagtacctgtattatctaaacaaaacacaatcaaatagtggaactcttcagcagtctcggctactgtttagtcaagctggacctaccagcatgtctcttcaagctaaaaactggctgcctggaccttgctacagacaacagcgtctgtcaaagcaggcaaacgacaacaacaacagcaactttccctggactgcggctacaaagtatcatctaaatggccgggactcgttggttaatccaggaccagctatggccagccacaaagacgatgaagaaaagtttttccccatgcatggaaccctgatatttggcaaacaagggacaaatgctaacgacgcggatttggacaatgtcatgattacagatgaagaagaaatccgtaccaccaatcccgtggctacggagcagtacgggactgtgtcaaataatttgcaaaactcaaatactggtccaactactggaactgtcaatcaccaaagagcgttacctggtatggtgtggcaggatcgagacgtgtaccttcagggacccatttgggccaagattcctcacaccgatggacactttcacccttctccgctgatgggaggttttggactcaaacacccgcctcctcagatcatgatcaaaaacactcccgttccagccaatcctcccacaaacttcagttctgccaagtttgcttctttcatcacacagtattccacgggacaggttagcgtggagatcgagtgggagctgcagaaggagaacagcaaacgctggaaccccgagatccagtacacttccaactacaacaagtctgttaatgtggactttactgtggacactaatggtgtgtattcagagcctcgccccattggcaccagatacctgactcgtaatctgtaa

SEQ ID NO: 3647 - DNA, 2208 bp, Artificial Sequence
  source: /note="Description of Artificial Sequence: Synthetic polynucleotide"
atggctgccgatggttatcttccagattggctcgaggacactctctctgaaggaataagacagtggtggaagctcaaacctggcccaccaccgccaaagcccgcagggcggcataaggacgacagcaggggtcttgtgcttcctgggtacaagtacctcggacccttcaacggactcgacaagggagagccggtcaacgaggcagacgccgcggccctcgagcacgacaaggcctacgaccggcagctcgacagcggagacaacccgtacctcaagtacaaccacgccggcgcggagtttcaggagcgccttaaagaagatacgtcttttgggggcaacctcggacgagcagtattccaggcgaaaaagagggttcttgaacctctgggcctggttgaggagcctgttaagacggccccgggaaaaaagaggccggtagagcactctcctgtggagccagactcctcctcgggaaccggaaaagcgggccagcagcctgcgaggaagagattgaattttggtcagactggagacgcagactccgtacctgacccccagcctctcggacagccaccagcagcccccacaagtttgggatctactacaatggctacaggcagtggcgcaccaatggcagacagtaacgagggtgccgatggagtgggtaattcctcagggaattggcattgcgattcccaatggttgggcgacagagtcatcaccaccagcacccgaacctgggccctgcccacctacaacaaccacctctacaagcaaatctccagccaatcaggagccagcaacgacaaccactactttggctacagcaccccctgggggtattttgacttcaacagattccactgccacttttcaccacgtgactggcaaagactcatcaacaacaactggggattccgacccaagagactcaacttcaagctctttaacattcaagtcaaagaggtcacgcagaatgacggtacgacgacgattgccaataaccttaccagcacggttccggtgtttactgactcggagtaccagctcccgtacgtcctcggctcggcgcatcaaggatgcctcccgccgtttccagcggacgtcttcatggtcccacagtatggatacctcaccctgaacaacgggagtcaggcggtaggacgctcttccttttactgcctggagtactttccttctcagatgcttcgtaccggaaacaactttaccttcagttacacctttgaagacgttcctttccacagcagctacgctcacagtcaaagtctggaccggctgatgaatcctcttatcgaccagtacctgtattatctaaacaaaacacaatcaaatagtggaactcttcagcagtctcggctactgtttagtcaagctggacctaccagcatgtctcttcaagctaaaaactggctgcctggaccttgctacagacaacagcgtctgtcaaagcaggcaaacgacaacaacaacagcaactttccctggactgcggctacaaagtatcatctaaatggccgggactcgttggttaatccaggaccagctatggccagccacaaagacgatgaagaaaagtttttccccatgcatggaaccctgatatttggcaaacaagggacaaatgctaacgacgcggatttggacaatgtcatgattacagatgaagaagaaatccgtaccaccaatcccgtggctacggagcagtacgggactgtgtcaaataatttgcaaaactcaaatactggtccaactactggaactgtcaatcaccaaagagcgttacctggtatggtgtggctggatcgagacgtgtaccttcagggacccatttgggccaagattcctcacaccgatggacactttcacccttctccgctgatgggaggttttggactcaaacacccgcctcctcagatcatgatcaaaaacactcccgttccagccaatcctcccacaaacttcagttctgccaagtttgcttctttcatcacacagtattccacgggacaggttagcgtggagatcgagtgggagctgcagaaggagaacagcaaacgctggaaccccgagatccagtacacttccaactacaacaagtctgttaatgtggactttactgtggacactaatggtgtgtattcagagcctcgccccattggcaccagatacctgactcgtaatctgtaa

SEQ ID NO: 3648 - DNA, 2208 bp, Artificial Sequence
  source: /note="Description of Artificial Sequence: Synthetic polynucleotide"
atggctgccgatggttatcttccagattggctcgaggacactctctctgaaggaataagacagtggtggaggctcaaacctggcccaccaccgccaaagcccgcagggcggcataaggacgacagcaggggtcttgtgcttcctgggtacaagtacctcggacccttcaacggactcgacaagggagagccggtcaacgaggcagacgccgcggccctcgagcacgacaaggcctacgaccggcagctcgacagcggagacaacccgtacctcaagtacaaccacgccggcgcggagtttcaggagcgccttaaagaagatacgtcttttgggggcaacctcggacgagcagtattccaggcgaaaaagagggttcttgaacctctgggcctggttgaggagcctgttaagacggccccgggaaaaaagaggccggtagagcactctcctgtggagccagactcctcctcgggaaccggaaaagcgggccagcagcctgcgaggaagagattgaattttggtcagactggagacgcagactccgtacctgacccccagcctctcggacagccaccagcagcccccacaagtttgggatctactacaatggctacaggcagtggcgcaccaatggcagacaataacgagggtgccgatggagtgggtaattcctcagggaattggcattgcgattcccaatggttgggcgacagagtcatcaccaccagcacccgaacctgggccctgcccacctacaacaaccacctctacaagcaaatctccagccaatcaggagccagcaacgacaaccactactttggctacagcaccccctgggggtattttgacttcaacagattccactgccacttttcaccacgtgactggcaaagactcatcaacaacaactggggattccgacccaagagactcaacttcaagctctttaacattcaagtcaaagaggtcacgcagaatgacggtacgacgacgattgccaataaccttaccagcacggttccggtgtttactgactcggagtaccagctcccgtacgtcctcggctcggcgcatcaaggatgcctcccgccgtttccagcggacgtcttcatggtcccacagtatggatacctcaccctgaacaacgggagtcaggcggtaggacgctcttccttttactgcctggagtactttccttctcagatgcttcgtaccggaaacaactttaccttcagttacacctttgaagacgttcctttccacagcagctacgctcacagtcaaagtctggaccggctgatgaatcctcttatcgaccagtacctgtattatctaaacaaaacacaatcaaatagtggaactcttcagcagtctcggctactgtttagtcaagctggacctaccagcatgtctcttcaagctaaaaactggctgcctggaccttgctacagacaacagcgtctgtcaaagcaggcaaacgacaacaacaacagcaactttccctggactgcggctacaaagtatcatctaaatggccgggactcgttggttaatccaggaccagctatggccagccacaaagacgatgaagaaaagtttttccccatgcatggaaccctgatatttggcaaacaagggacaaatgctaacgacgcggatttggacaatgtcatgattacagatgaagaagaaatccgtaccaccaatcccgtggctacggagcagtacgggactgtgtcaaataatttgcaaaactcaaatactggtccaactactggaactgtcaatcaccaaagagcgttacctggtatggtgtggcaggatcgagacgtgtaccttcagggacccatttgggccaagattcctcacaccgatggacactttcacccttctccgctgatgggaggttttggactcaaacacccgcctcctcagatcatgatcaaaaacactcccgttccagccaatcctcccacaaacttcagttctgccaagtttgcttctttcatcacacagtattccacgggacaggttagcgtggagatcgagtgggagctgcagaaggagaacagcaaacgctggaaccccgagatccagtacacttccaactacaacaagtctgttaatgtggactttactgtggacactaatggtgtgtattcagagcctcgccccattggcaccagatacctgactcgtaatctgtaa

SEQ ID NO: 3649 - DNA, 2208 bp, Artificial Sequence
  source: /note="Description of Artificial Sequence: Synthetic polynucleotide"
atggctgccgatggttatcttccagattggctcgaggacactctctctgaaggaataagacagtggtggaagctcaaacctggcccaccaccgccaaagcccgcagggcggcataaggacgacagcaggggtcttgtgcttcctgggtacaagtacctcggacccttcaacggactcgacaagggagagccggtcaacgaggcagacgccgcggccctcgagcacgacaaggcctacgaccggcagctcgacagcggagacaacccgtacctcaagtacaaccacgccggcgcggagtttcaggagcgccttaaagaagatacgtcttttgggggcaacctcggacgagcagtattccaggcgaaaaagagggttcttgaacctctgggcctggttgaggagcctgttaagacggccccgggaaaaaagaggccggtagagcactctcctgtggagccagactcctcctcgggaaccggaaaagcgggccagcagcctgcgaggaagagattgaattttggtcagactggagacgcagactccgtacctgacccccagcctctcggacagccaccagcagcccccacaagtttgggatctactacaatggctacaggcagtggcgcaccaatggcagacaataacgagggtgccgatggagtgggtaattcctcagggaattggcattgcgattcccaatggttgggcgacagagtcatcaccaccagcacccgaacctgggccctgcccacctacaacaaccacctctacaagcaaatctccagccaatcaggagccagcaacgacaaccactactttggctacagcaccccctgggggtattttgacttcaacagattccactgccacttttcaccacgtgactggcaaagactcatcaacaacaactggggattccgacccaagagactcaacttcaagctctttaacattcaagtcaaagaggtcacgcagaatgacggtacgacgacgattgccaataaccttaccagcacggttccggtgtttactgactcggagtaccagctcccgtacgtcctcggctcggcgcatcaaggatgcctcccgccgtttccagcggacgtcttcatggtcccacagtatggatacctcaccctgaacaacgggagtcaggcggtaggacgctcttccttttactgcctggagtactttccttctcagatgcttcgtaccggaaacaactttaccttcagttacacctttgaagacgttcctttccacagcagctacgctcacagtcaaagtctggaccggctgatgaatcctcttatcgaccagtacctgtattatctaaacaaaacacaatcaaatagtggaactcttcagcagtctcggctactgtttagtcaagctggacctaccagcatgtctcttcaagctaaaaactggctgcctggaccttgctacagacaacagcgtctgtcaaagcaggcaaacgacaacaacaacagcaactttccctggactgcggctacaaagtatcatctaaatggccgggactcgttggttaatccaggaccagctatggccagccacaaagacgatgaagaaaagtttttccccatgcatggaaccctgatatttggcaaacaagggacaaatgctaacgacgcggatttggacaatgtcatgattacagatgaagaagaaatccgtaccaccaatcccgtggctacggagcagtacgggactgtgtcaaataatttgcaaaactcaaatactggtccaactactggaactgtcaatcaccaaagagcgttacctggtatggtgtggcaggatcgagacgtgtaccttcagggacccatttgggccaagattcctcacaccgatggacactttcacccttctccgctgatgggaggttttggactcaaacacccgcctcctcagatcatgatcaaaaacactcccgttccagccaatcctcccacaaacttcagttctgccaagtttgcttctttcatcacacagtattccacgggacaggttagcgtggagatcgagtgggagctgcagaaggagaacagcaaacgctggaaccccgagatccagtacacttccaactacaacaagtctgttaatgtggaccttactgtggacactaatggtgtgtattcagagcctcgccccattggcaccagatacctgactcgtaatctgtaa

SEQ ID NO: 3650 - DNA, 2208 bp, Artificial Sequence
  source: /note="Description of Artificial Sequence: Synthetic polynucleotide"
atggctgccgatggttatcttccagattggctcgaggacactctctctgaaggaataagacagtggyggaagctcaaacctggcccaccaccgccaaagcccgcagggcggcataaggacgacagcaggggtcttgtgcttcctgggtacaagtacctcggacccttcaacggactcgacaagggagagccggtcaacgaggcagacgccgcggccctcgagcacgacaaggcctacgaccggcagctcgacagcggagacaacccgtacctcaagtacaaccacgccggcgcggagtttcaggagcgccttaaagaagatacgtcttttgggggcaacctcggacgagcagtattccaggcgaaaaagagggttcttgaacctctgggcctggttgaggagcctgttaagacggccccgggaaaaaagaggccggtagagcactctcctgtggagccagactcctcctcgggaaccggaaaagcgggccagcagcctgcgaggaagagattgaattttggtcagactggagacgcagactccgtacctgacccccagcctctcggacagccaccagcagcccccacaagtttgggatctactacaatggctacaggcagtggcgcaccaatggcagacaataacgagggtgccgatggagtgggtaattcctcagggaattggcattgcgattcccaatggttgggcgacagagtcatcaccaccagcacccgaacctgggccctgcccacctacaacaaccacctctacaagcaaatctccagccaatcaggagccagcaacgacaaccactactttggctacagcaccccctgggggtattttgacttcaacagattccactgccacttttcaccacgtgactggcaaagactcatcaacaacaactggggattccgacccaagagactcaacttcaagctctttaacattcaagtcaaagaggtcacgcagaatgacggtacgacgacgattgccaataaccttaccagcacggttccggtgtttactgactcggagtaccagctcccgtacgtcctcggctcggcgcatcaaggatgcctcccgccgtttccagcggacgtcttcatggtcccacagtatggataccccaccctgaacaacgggagtcaggcggtaggacgctcttccttttactgcctggagtactttccttctcagatgcttcgtaccggaaacaactttaccttcagttacacctttgaagacgttcctttccacagcagctacgctcacagtcaaagtctggaccggctgatgaatcctcttatcgaccagtacctgtattatctaaacaaaacacaatcaaatagtggaactcttcagcagtctcggctactgtttagtcaagctggacctaccagcatgtctcttcaagctaaaaactggctgcctggaccttgctacagacaacagcgtctgtcaaagcaggcaaacgacaacaacaacagcaactttccctgggctgcggctacaaagtatcatctaaatggccgggactcgttggttaatccaggaccagctatggccagccacaaagacgatgaagaaaagtttttccccatgcatggaaccctgatatttggcaaacaagggacaaatgctaacgacgcggatttggacaatgtcatgattacagatgaagaagaaatccgtaccaccaatcccgtggctacggagcagtacgggactgtgtcaaataatttgcaaaactcaaatactggtccaactactggaactgtcaatcaccaaagagcgttacctggtatggtgtggcaggatcgagacgtgtaccttcagggacccatttgggccaagattcctcacaccgatggacactttcacccttctccgctgatgggaggttttggactcaaacacccgcctcctcagatcatgatcaaaaacactcccgttccagccaatcctcccacaaacttcagttctgccaagtttgcttctttcatcacacagtattccacgggacaggttagcgtggagatcgagtgggagctgcagaaggagaacagcaaacgctggaaccccgagatccagtacacttccaactacaacaagtctgttaatgtggactttactgtggacactaatggtgtgtattcagagcctcgccccattggcaccagatacctgactcgtaatctgtaa

SEQ ID NO: 3651 - DNA, 2208 bp, Artificial Sequence
  source: /note="Description of Artificial Sequence: Synthetic polynucleotide"
atggctgccgatggttatcttccagattggctcgaggacactctctctgaaggaataagacagtggtggaagctcaaacctggcccaccaccaccaaagcccgcagagcggcatcaggacgacagcaggggtcttgtgcttcctgggtacaagtacctcggacccttcaacggactcgacaaaggagagccggtcaacgaggcagacgctgcggccctcgagcacgacaaggcctacgaccggcagctcgacagcggagacaacccgtacctcaagtacaaccacgccgacgcggagtttcaggagcgtcttaaagaagatacgtcttttgggggcaacctcggacgagcagtcttccaggcgaaaaagagggttcttgaacctctgggcctggttgaggaacctgttaagacggctccgggaaaaaagaggccggtagagcactctcctgcggagccagactcctcctcgggaaccggaaaagcgggccagcagcctgcaagaaagagattgaatttcggtcagactggagacgcagactccgtacctgacccccagcctctcggacagccaccagcagcccccacaagtttgggatctactacaatggctacaggcagtggcgcaccaatggcagacaataacgagggtgccgatggagtgggtaattcctcaggaaattggcattgcgattcccaatggctgggcgacagagtcatcaccaccagcacccgaacctgggccctgcccacctacaacaaccacctctacaagcaaatctccagccaatcaggagcatcgaacgacaaccactactttggctacagcaccccttgggggtattttgacttcaacagattccactgtcacttctccccacgtgactggcaaagactcatcaacaacaactggggattccgacccaagagactcaacttcaagctctttaacattcaagtcaaagaggtcacgcagaatgacggtacgacgacgattgccaataaccttaccagcacggttcaggtgtttactgactcggagtaccagctcccgtacgtcctcggctcggcgcatcaaggatgcctcccgccgtttccagcggacgtcttcatggtcccacagtatggatacctcaccctgaacaacgggagtcaggcggtaggacgctcttccttttactgcctggagtactttccttctcagatgctgcgtaccggaaacaactttaccttcagctacacctttgaggacgtgcctttccacagcagctacgctcacagccagagtttggaccggctgatgaatcctctgatcgaccagtatctgtattatctgaacaggacacaatcaaatagtggaactcttcagcagtctaggctactgtttagccaagctggacccaccagcatgtctcttcaagctaaaaactggctgcctggaccttgctacagacagcagcgtctgtcaaagcaggcaaacgacaacaacaacagcaactttccctggactgcggctacaaagtatcatctaaatggtcgggactcgttggttaatccaggaccagctatggccagccacaaagacgatgaagaaaagtttttccccatgcatggaaccctgatatttggtaaacaaggaacaaatgctaacgacgcggatttggaacatgtcatgattacagatgaagaagaaatcaggaccaccaatcccgtggctacagagcagtacggaaacgtgtcaaataatttgcaaaactcaaatactggtccaactacagaaaatgtcaatcaccagggagcgttacctggtatggtgtggcaggatcgagacgtgtacctgcagggacccatttgggccaagattcctcacaccgacggacactttcacccttctccactgatgggaggttttggactcaaacacccgcctcctcaaatcatgatcaaaaacactcctgttccagccaatcctcctacaaacttcagcgcggcaaagtttgcttccttcatcacacagtattccacgggacaggtcagcgtggagatcgagtgggagctgcagaaggagaacagcaaacgctggaaccccgagatccagtacacttccaactacaacaaatctgttaatgtggactttactgtggacactaatggtgtgtattcagagcctcgccccattggcaccagatacctgactcgtaatctgtaa

SEQ ID NO: 3652 - DNA, 2205 bp, Artificial Sequence
  source: /note="Description of Artificial Sequence: Synthetic polynucleotide"
atggctgccgatggttatcttccagattggctcgaggacactctctctgaaggaataagacagtggtggaagctcaaacctggcccaccaccaccaaagcccgcagagcggcatcaggacgacagcaggggtcttgtgcttcctgggtacaagtacctcggacccttcaacggactcgacaaaggagagccggtcaacgaggcagacgctgcggccctcgagcacgacaaggcctacgaccggcagctcgacagcggagacaacccgtacctcaagtacaaccacgccgacgcggagtttcaggagcgtcttaaagaagatacgtcttttgggggcaacctcggacgagcagtcttccaggcgaaaaagagggttcttgaacctctgggcctggttgaggaacctgttaagacggctccgggaaaaaagaggccggtagagcactctcctgcggagccagactcctcctcgggaaccggaaaagcgggccagcagcctgcaagaaagagattgaatttcggtcagactggagacgcagactccgtacctgacccccagcctctcggacagccaccagcagcccccacaagtttgggatctactacaatggctacaggcagtggcgcaccaatggcagacaataacgagggtgccgatggagtgggtaattcctcaggaaattggcattgcgattcccaatggctgggcgacagagtcatcaccaccagcacccgaacctgggccctgcccacctacaacaaccacctctacaagcaaatctccagccaatcaggagcatcgaacgacaaccactactttggctacagcaccccttgggggtattttgacttcaacagattccactgtcacttctccccacgtgactggcaaagactcatcaacaacaactggggattccgacccaagagactcaacttcaagctctttaacattcaagtcaaagaggtcacgcagaatgacggtacgacgacgattgccaataaccttaccagcacggttcaggtgtttactgactcggagtaccagctcccgtacgtcctcggctcggcgcatcaaggatgcctcccgccgtttccagcggacgtcttcatggtcccacagtatggatacctcaccctgaacaacgggagtcaggcggtaggacgctcttccttttactgcctggagtactttccttctcagatgctgcgtaccggaaacaactttaccttcagctacacctttgaggacgtgcctttccacagcagctacgctcacagccagagtttggaccggctgatgaatcctctgatcgaccagtatctgtattatctgaacaggacacaatcaaatagtggaactcttcagcagtctaggctactgtttagccaagctggacccaccagcatgtctcttcaagctaaaaactggctgcctggaccttgctacagacagcagcgtctgtcaaagcaggcaaacgacaacaacagcaactttccctggactgcggctacaaagtatcatctaaatggtcgggactcgttggttaatccaggaccagctatggccagccacaaagacgatgaagaaaagtttttccccatgcatggaaccctgatatttggtaaacaaggaacaaatgctaacgacgcggatttggaacatgtcatgattacagatgaagaagaaatcaggaccaccaatcccgtggctacagagcagtacggaaacgtgtcaaataatttgcaaaactcaaatactggtccaactacagaaaatgtcaatcaccagggagcgttacctggtatggtgtggcaggatcgagacgtgtacctgcagggacccatttgggccaagattcctcacaccgacggacactttcacccttctccactgatgggaggttttggactcaaacacccgcctcctcaaatcatgatcaaaaacactcctgttccagccaatcctcctacaaacttcagcgcggcaaagtttgcttccttcatcacacagtattccacgggacaggtcagcgtggagatcgagtgggagctgcagaaggagaacagcaaacgctggaaccccgagatccagtacacttccaactacaacaaatctgttaatgtggactttactgtggacactaatggtgtgtattcagagcctcgccccattggcaccagatacctgactcgtaatctgtaa

SEQ ID NO: 3653 - DNA, 2205 bp, Artificial Sequence
  source: /note="Description of Artificial Sequence: Synthetic polynucleotide"
atggctgccgatggttatcttccagattggctcgaggacactctctctgaaggaataagacagtggtggaagctcaaacctggcccaccaccaaagcccgcagagcggcatcaggacgacagcaggggtcttgtgcttcctgggtacaagtacctcggacccttcaacggactcgacaaaggagagccggtcaacgaggcagacgctgcggccctcgagcacgacaaggcctacgaccggcagctcgacagcggagacaacccgtacctcaagtacaaccacgccgacgcggagtttcaggagcgtcttaaagaagatacgtcttttgggggcaacctcggacgagcagtcttccaggcgaaaaagagggttcttgaacctctgggcctggttgaggaacctgttaagacggctccgggaaaaaagaggccggtagagcactctcctgcggagccagactcctcctcgggaaccggaaaagcgggccagcagcctgcaagaaagagattgaatttcggtcagactggagacgcagactccgtacctgacccccagcctctcggacagccaccagcagcccccacaagtttgggatctactacaatggctacaggcagtggcgcaccaatggcagacaataacgagggtgccgatggagtgggtaattcctcaggaaattggcattgcgattcccaatggctgggcgacagagtcatcaccaccagcacccgaacctgggccctgcccacctacaacaaccacctctacaagcaaatctccagccaatcaggagcatcgaacgacaaccactactttggctacagcaccccttgggggtattttgacttcaacagattccactgtcacttctccccacgtgactggcaaagactcatcaacaacaactggggattccgacccaagagactcaacttcaagctctttaacattcaagtcaaagaggtcacgcagaatgacggtacgacgacgattgccaataaccttaccagcacggttcaggtgtttactgactcggagtaccagctcccgtacgtcctcggctcggcgcatcaaggatgcctcccgccgtttccagcggacgtcttcatggtcccacagtatggatacctcaccctgaacaacgggagtcaggcggtaggacgctcttccttttactgcctggagtactttccttctcagatgctgcgtaccggaaacaactttaccttcagctacacctttgaggacgtgcctttccacagcagctacgctcacagccagagtttggaccggctgatgaatcctctgatcgaccagtatctgtattatctgaacaggacacaatcaaatagtggaactcttcagcagtctaggctactgtttagccaagctggacccaccagcatgtctcttcaagctaaaaactggctgcctggaccttgctacagacagcagcgtctgtcaaagcaggcaaacgacaacaacaacagcaactttccctggactgcggctacaaagtatcatctaaatggtcgggactcgttggttaatccaggaccagctatggccagccacaaagacgatgaagaaaagtttttccccatgcatggaaccctgatatttggtaaacaaggaacaaatgctaacgacgcggatttggaacatgtcatgattacagatgaagaagaaatcaggaccaccaatcccgtggctacagagcagtacggaaacgtgtcaaataatttgcaaaactcaaatactggtccaactacagaaaatgtcaatcaccagggagcgttacctggtatggtgtggcaggatcgagacgtgtacctgcagggacccatttgggccaagattcctcacaccgacggacactttcacccttctccactgatgggaggttttggactcaaacacccgcctcctcaaatcatgatcaaaaacactcctgttccagccaatcctcctacaaacttcagcgcggcaaagtttgcttccttcatcacacagtattccacgggacaggtcagcgtggagatcgagtgggagctgcagaaggagaacagcaaacgctggaaccccgagatccagtacacttccaactacaacaaatctgttaatgtggactttactgtggacactaatggtgtgtattcagagcctcgccccattggcaccagatacctgactcgtaatctgtaa

SEQ ID NO: 3654 - DNA, 2208 bp, Artificial Sequence
  source: /note="Description of Artificial Sequence: Synthetic polynucleotide"
atggctgccgatggttatcttccagattggctcgaggacactctctctgaaggaataagacagtggtggaagctcaaacctggcccaccaccaccaaagcccgcagagcggcatcaggacgacagcaggggtcttgtgcttcctgggtacaagtacctcggacccttcaacggactcgacaaaggagagccggtcaacgaggcagacgctgcggccctcgagcacgacaaggcctacgaccggcagctcgacagcggagacaacccgtacctcaagtacaaccacgccgacgcggagtttcaggagcgtcttaaagaagatacgtcttttgggggcaacctcggacgagcagtcttccaggcgaaaaagagggttcttgaacctctgggcctggttgaggaacctgttaagacggctccgggaaaaaagaggccggtagagcactctcctgcggagccagactcctcctcgggaaccggaaaagcgggccagcagcctgcaagaaagagattgaatttcggtcagactggagacgcagactccgtacctgacccccagcctctcggacagccaccagcagcccccacaagtttgggatctactacaatggctacaggcagtggcgcaccaatggcagacaataacgagggtgccgatggagtgggtaattcctcaggaaattggcattgcgattcccaatggctgggcgacagagtcatcaccaccagcacccgaacctgggccctgcccacctacaacaaccacctctacaagcaaatctccagccaatcaggagcatcgaacgacaaccactactttggctacagcaccccttgggggtattttgacttcaacagattccactgtcacttctccccacgtgactggcaaagactcatcaacaacaactggggattccgacccaagagactcaacttcaagctctttaacattcaagtcaaagaggtcacgcagaatgacggtacgacgacgattgccaataaccttaccagcacggttcaggtgtttactgactcggagtaccagctcccgtacgtcctcggctcggcgcatcaaggatgcctcccgccgtttccagcggacgtcttcatggtcccacagtatggatacctcaccctgaacaacgggagtcaggcggtaggacgctcttccttttactgcctggagtactttccttctcagatgctgcgtaccggaaacaactttaccttcagctacacctttgaggacgtgcctttccacagcagctacgctcacagccagagtttggaccggctgatgaatcctctgatcgaccagtatctgtattatctgaacaggacacaatcaaatagtggaactcttcagcagtctaggctactgtttagccaagctggacccaccagcatgtctcttcaagctaaaaactggctgcctggaccttgctacagacagcagcgtctgtcaaagcaggcaaacgacaacaacaacagcaactttccctggactgcggctacaaagtatcatctaaatggtcgggactcgttggttaatccaggaccagctatggccagccacaaagacgatgaagaaaagtttttccccatgcatggaaccctgatatttggtaaacaaggaacaaatgctaacgacgcggatttggaacatgtcatgattacagatgaagaagaaatcaggaccaccaatcccgtggctacagagcagtacggaaacgtgtcaaataatttgcaaaactcaaatactggtccaactacagaaaatgtcaatcaccagggagcgttacctggtatggtgtggcaggatcgagacgcgtacctgcagggacccatttgggccaagattcctcacaccgacggacactttcacccttctccactgatgggaggttttggactcaaacacccgcctcctcaaatcatgatcaaaaacactcctgttccagccaatcctcctacaaacttcagcgcggcaaagtttgcttccttcatcacacagtattccacgggacaggtcagcgtggagatcgagtgggagctgcagaaggagaacagcaaacgctggaaccccgagatccagtacacttccaactacaacaaatctgttaatgtggactttactgtggacactaatggtgtgtattcagagcctcgccccattggcaccagatacctgactcgtaatctgtaa

SEQ ID NO: 3655 - DNA, 2208 bp, Artificial Sequence
  source: /note="Description of Artificial Sequence: Synthetic polynucleotide"
atggctgccgatggttatcttccagattggctcgaggacactctctctgaaggaataagacagtggtggaagctcaaacctggcccaccaccaccaaagcccgcagagcggcatcaggacgacagcaggggtcttgtgcttcctgggtacaagtacctcggacccttcaacggactcgacaaaggagagccggtcaacgaggcagacgctgcggccctcgagcacgacaaggcctacgaccggcagctcgacagcggagacaacccgtacctcaagtacaaccacgccgacgcggagtttcaggagcgtcttaaagaagatacgtcttttgggggcaacctcggacgagcagtcttccaggcgaaaaagagggttcttgaacctctgggcctggttgaggaacctgctaagacggctccgggaaaaaagaggccggtagagcactctcctgcggagccagactcctcctcgggaaccggaaaagcgggccagcagcctgcaagaaagagattgaatttcggtcagactggagacgcagactccgtacctgacccccagcctctcggacagccaccagcagcccccacaagtttgggatctactacaatggctacaggcagtggcgcaccaatggcagacaataacgagggtgccgatggagtgggtaattcctcaggaaattggcattgcgattcccaatggctgggcgacagagtcatcaccaccagcacccgaacctgggccctgcccacctacaacaaccacctctacaagcaaatctccagccaatcaggagcatcgaacgacaaccactactttggctacagcaccccttgggggtattttgacttcaacagattccactgtcacttctccccacgtgactggcaaagactcatcaacaacaactggggattccgacccaagagactcaacttcaagctctttaacattcaagtcaaagaggtcacgcagaatgacggtacgacgacgattgccaataaccttaccagcacggttcaggtgtttactgactcggagtaccagctcccgtacgtcctcggctcggcgcatcaaggatgcctcccgccgtttccagcggacgtcttcatggtcccacagtatggatacctcaccctgaacaacgggagtcaggcggtaggacgctcttccttttactgcctggagtactttccttctcagatgctgcgtaccggaaacaactttaccttcagctacacctttgaggacgtgcctttccacagcagctacgctcacagccagagtttggaccggctgatgaatcctctgatcgaccagtatctgtattatctgaacaggacacaatcaaatagtggaactcttcagcagtctaggctactgtttagccaagctggacccaccagcatgtctcttcaagctaaaaactggctgcctggaccttgctacagacagcagcgtctgtcaaagcaggcaaacgacaacaacaacagcaactttccctggactgcggctacaaagtatcatctaaatggtcgggactcgttggttaatccaggaccagctatggccagccacaaagacgatgaagaaaagtttttccccatgcatggaaccctgatatttggtaaacaaggaacaaatgctaacgacgcggatttggaacatgtcatgattacagatgaagaagaaatcaggaccaccaatcccgtggctacagagcagtacggaaacgtgtcaaataatttgcaaaactcaaatactggtccaactacagaaaatgtcaatcaccagggagcgttacctggtatggtgtggcaggatcgagacgtgtacctgcagggacccatttgggccaagattcctcacaccgacggacactttcacccttctccactgatgggaggttttggactcaaacacccgcctcctcaaatcatgatcaaaaacactcctgttccagccaatcctcctacaaacttcagcgcggcaaagtttgcttccttcatcacacagtattccacgggacaggtcagcgtggagatcgagtgggagctgcagaaggagaacagcaaacgctggaaccccgagatccagtacacttccaactacaacaaatctgttaatgtggactttactgtggacactaatggtgtgtattcagagcctcgccccattggcaccagatacctgactcgtaatctgtaa

SEQ ID NO: 3656 - DNA, 2208 bp, Artificial Sequence
  source: /note="Description of Artificial Sequence: Synthetic polynucleotide"
atggctgccgatggttatcttccagattggctcgaggacactctctctgaaggaataagacagtggtggaagctcaaacctggcccaccaccaccaaagcccgcagagcggcatcaggacgacagcaggggtcttgtgcttcctgggtacaagtacctcggacccttcaacggactcgacaaaggagagccggtcaacgaggcagacgctgcggccctcgagcacgacaaggcctacgaccggcagctcgacagcggagacaacccgtacctcaagtacaaccacgccgacgcggagtttcaggagcgtcttaaagaagatacgtcttttgggggcaacctcggacgagcagtcttccaggcgaaaaagagggttcttgaacctctgggcctggttgaggaacctgttaagacggctccgggaaaaaagaggccggtagagcactctcctgcggagccagactcctcctcgggaaccggaaaagcgggccagcagcctgcaagaaagagattgaatttcggtcagactggagacgcagactccgtacctgacccccagcctctcggacagccaccagcagcccccacaagtttgggatctactacaatggctacaggcagtggcgcaccaatggcagacaataacgagggtgccgatggagtgggtaattcctcaggaaattggcattgcgattcccaatggctgggcgacagagtcatcaccaccagcacccgaacctgggccctgcccacctacaacaaccacctctacaagcaaatctccagccaatcaggagcatcgaacgacaaccactactttggctacagcaccccttgggggtattttgacttcaacagattccactgtcacttctccccacgtgactggcaaagactcatcaacaacaactggggattccgacccaagagactcaacttcaagctctttaacattcaagtcaaagaggtcacgcagaatgacggtacgacgacgattgccaataaccttaccagcacggttcaggtgtttactgactcggagtaccagctcccgtacgtcctcggctcggcgcatcaaggatgcctcccgccgtttccagcggacgtcttcatggtcccacagtatggatacctcaccctgaacaacgggagtcaggcggtaggacgctcttccttttactgcctggagtactttccttctcagatgctgcgtaccggaaacaactttaccttcagctacacctttgaggacgtgcctttccacagcagctacgctcacagccagagtttggaccggctgatgaatcctctgatcgaccagtatctgtattatctgaacaggacacaatcaaatagtggaactcttcagcagtctaggctactgtttagccaagctggacccaccagcatgtctcttcaagctaaaaactggctgcctggaccttgctacagacagcagcgtctgtcaaagcaggcaaacgacaacaacaacagcaactttccctggactgcggctacaaagtatcatctaaatggtcgggactcgttggttaatccaggaccagctatggccagccacaaagacgatgaagaaaagtttttccccatgcatggaaccctgatatttggtaaacaaggaacaaatgctaacgacgcggatttggaacatgtcatgattacagatgaagaagaaatcaggaccaccaatcccgtggctacagagcagtacggaaacgtgtcaaataatttgcaaaactcaaatactggtccaactacagaaaatgtcaatcaccagggagcgttacctggtatggtgtggcaggatcgagacgtgtacctgcagggacccatttgggccaagattcctcacaccgacggacactttcacccttctccactgatgggaggttttggactcaaacacccgcctcctcaaatcatgatcaaaaacactcctgttccagccaatcctcctacaaacttcagcgcggcaaagtttgcttccttcatcacacagtattccacgggacaggtcagcgtggagatcgagtgggagctgcagaaggagaacagcaaacgctggaaccccgagatccagtacacttccaactacaacaaatctgttaatgtggactttactgtggacactaatggtgcgtattcagagcctcgccccattggcaccagatacctgactcgtaatctgtaa

SEQ ID NO: 3657 - DNA, 2208 bp, Artificial Sequence
  source: /note="Description of Artificial Sequence: Synthetic polynucleotide"
atggctgccgatggttatcttccagattggctcgaggacactctctctgaaggaataagacagtggtggaagctcaaacctggcccaccaccgccaaagcccgcagagcggcataaggacgacagcaggggtcttgtgcttcctgggtacaagtacctcggacccttcaacggactcgacaagggagagccggtcaacgaggcagacgccgcggccctcgagcacgacaaggcctacgaccggcagctcgacagcggagacaacccgtacctcaagtacaaccacgccgacgcggagtttcaggagcgccttaaagaagatacgtcttttgggggcaacctcggacgagcagtattccaggcgaaaaagagggttcttgaacctctgggcctggttgaggagcctgttaagacggctccgggaaaaaagaggccggtagagcactctcctgtggagccagactcctcctcgggaaccggaaaagcgggccagcagcctgcgagaaagagattgaattttggtcagactggagacgcagactccgtacctgacccccagcctctcggacagccaccagcagcccccacaagtttgggatctactacaatggctacaggcagtggcgcaccaatggcagacaataacgagggtgccgatggagtgggtaattcctcaggaaattggcattgcgattcccaatggtcgggcgacagagtcatcaccaccagcacccgaacctgggccctgcccacctacaacaaccacctctacaagcaaatctccagccaatcaggagccagcaacgacaaccactactttggctacagcaccccctgggggtattttgacttcaacagattccactgccacttttcaccacgtgactggcaaagactcatcaacaacaactggggattccgacccaagagactcaacttcaagctctttaacattcaagtcaaagaggtcacgcagaatgacggtacgacgacgattgccaataaccttaccagcacggttcaggtgtttactgactcggagtaccagctcccgtacgtcctcggctcggcgcatcaaggatgcctcccgccgtttccagcggacgtcttcatggtcccacagtatggatacctcaccctgaacaacgggagtcaggcggtaggacgctcttccttttactgcctggagtactttccttctcagatgcttcgtaccggaaacaactttaccttcagttacacctttgaagacgttcctttccacagcagctacgctcacagtcaaagtctggaccggctgatgaatcctcttatcgaccagtacctgtattatctaaacaaaacacaatcaaatagtggaactcttcagcagtctcggctactgtttagtcaagctggacctaccagcatgtctcttcaagctaaaaactggctgcctggaccttgctacagacaacagcgtctgtcaaagcaggcaaacgacaacaacaacagcaactttccctggactgcggctacaaagtatcatctaaatggccgggactcgttggttaatccaggaccagctatggccagccacaaagacgatgaagaaaagtttttccccatgcatggaaccctgatatttggcaaacaaggaacaaatgctaacgacgcggatttggacaatgtcatgattacagatgaagaagaaatccgtaccaccaatcccgtggctacggagcagtacgggactgtgtcaaataatttgcaaaactcaaatactggtccaactactggaactgtcaatcaccaaggagcgttacctggtatggtgtggcaggatcgagacgtgtaccttcagggacccatttgggccaagattcctcacaccgatggacactttcacccttctccgctgatgggaggttttggactcaaacacccgcctcctcagatcatgatcaaaaacactcccgttccagccaatcctcccacaaacttcagttctgccaagtttgcttctttcatcacacagtattccacgggacaggttagcgtggagatcgagtgggagctgcagaaggagaacagcaaacgctggaaccccgagatccagtacacttccaactacaacaagtctgttaatgtggactttactgtggacactaatggtgtgtattcagagcctcgccccattggcaccagatacctgactcgtaatctgtaa

SEQ ID NO: 3658 - DNA, 2208 bp, Artificial Sequence
  source: /note="Description of Artificial Sequence: Synthetic polynucleotide"
atggctgccgatggttatcttccagattggctcgaggacgctctctctgaaggaataagacagtggtggaagctcaaacctggcccaccaccgccaaagcccgcagagcggcataaggacgacagcaggggtcttgtgcttcctgggtacaagtacctcggacccttcaacggactcgacaagggagagccggtcaacgaggcagacgccgcggccctcgagcacgacaaggcctacgaccggcagctcgacagcggagacaacccgtacctcaagtacaaccacgccgacgcggagtttcaggagcgccttaaagaagatacgtcttttgggggcaacctcggacgagcagtattccaggcgaaaaagagggttcttgaacctctgggcctggttgaggagcccgttaagacggctccgggaaaaaagaggccggtagagcactctcctgtggagccagactcctcctcgggaaccggaaaagcgggccagcagcctgcgagaaagagattgaattttggtcagactggagacgcagactccgtacctgacccccagcctctcggacagccaccagcagcccccacaagtttgggatctactacaatggctacaggcagtggcgcaccaatggcagacaataacgagggtgccgatggagtgggtaattcctcaggaaattggcattgcgattcccaatggtcgggcgacagagtcatcaccaccagcacccgaacctgggccctgcccacctacaacaaccacctctacaagcaaatctccagccaatcaggagccagcaacgacaaccactactttggctacagcaccccctgggggtattttgacttcaacagattccactgccacttttcaccacgtgactggcaaagactcatcaacaacaactggggattccgacccaagagactcaacttcaagctctttaacattcaagtcaaagaggtcacgcagaatgacagtacgacgacgattgccaataaccttaccagcacggttcaggtgtttactgactcggagtaccagctcccgtacgtcctcggctcggcgcatcaaggatgcctcccgccgtttccagcggacgtcttcatggtcccacagtatggatacctcaccctgaacaacgggagtcaggcggtaggacgctcttccttttactgcctggagtactttccttctcagatgcttcgtaccggaaacaactttaccttcagttacacctttgaagacgttcctttccacagcagctacgctcacagtcaaagcctggaccggctgatgaatcctcttatcgaccagtacctgtattatctaaacaaaacacaatcaaatagtggaactcttcagcagtctcggctactgtttagtcaagctggacctaccagcatgtctcctcaagctaaaaactggctgcctggaccttgctacagacaacagcgtctgtcaaagcaggcaaacgacaacaacaacagcaactttccctggactgcggctacaaagtatcatctaaatggccgggactcgttggttaatccaggaccagctatggccagccacaaagacgatgaagaaaagtttttccccatgcatggaaccctgatatttggcaaacaaggaacaaatgctaacgacgcggatttggacaatgtcatgattacagatgaagaagaaatccgtaccaccaatcccgtggctacggagcagtacgggactgtgtcaaataatttgcaaaactcaaatactggtccaactactggaactgtcaatcaccaaggagcgttacctggtatggtgtggcaggatcgagacgtgtaccttcagggacccatttgggccaagattcctcacaccgatggacactttcacccttctccgctgatgggaggttttggactcaaacacccgcctcctcagatcatgatcaaaaacactcccgttccagccaatcctcccacaaacttcagttctgccaagtttgcttctttcatcacacagtattccacgggacaggttagcgtggagatcgagtgggagctgcagaaggagaacagcaaacgctggaaccccgagatccagtacacttccaactacaacaagtctgttaatgtggactttactgtggacactaatggtgtgtattcagagcctcgccccattggcaccagatacctgactcgtaatctgtaa

SEQ ID NO: 3659 - DNA, 2208 bp, Artificial Sequence
  source: /note="Description of Artificial Sequence: Synthetic polynucleotide"
atggctgccgatggttatcttccagattggctcgaggacactctctctgaaggaataagacagtggtggaagctcaaacctggcccaccaccgccaaagcccgcagagcggcataaggacgacagcaggggtcttgtgcttcctgggtacaagtacctcggacccttcaacggactcgacaagggagagccggtcaacgaggcaaacgccgcggccctcgagcacgacaaggcctacgaccggcagctcgacagcggagacaacccgtacctcaagtacgaccacgccgacgcggagtttcaggagcgccttaaagaagatacgtcttttgggggcaacctcggacgagcagtattccaggcgaaaaagagggttcttgaacctctgggcctggttgaggagcctgttaagacggctccgggaaaaaagaggtcggtagagcactctcctgtggagccagactcctcctcgggaaccggaaaagcgggccagcagcctgcgagaaagagattgaattttggtcagactggagacgcagactccgtacctgacccccagcctctcggacagccaccagcagcccccacaagtttgggatctactacaatggctacaggcagtggcgcaccaatggcagacaataacgagggtgccgatggagtgggtaattcctcaggaaattggcattgcgattcccaatggtcgggcgacagagtcatcaccaccagcacccgaacctgggccctgcccacctacaacaaccacctctacaagcaaatctccagccaatcaggagccagcaacgacaaccactactttggccacagcaccccctgggggtattttgacttcaacagattccactgccacttttcaccacgtgactggcaaagactcatcaacaacaactggggattccgacccaagagactcaacttcaagctctttaacattcaagtcaaagaggtcacgcagaatgacggtacgacgacgattgccaataaccttaccagcacggttcaggtgtttactgactcggagtaccggctcccgtacgtcctcggctcggcgcatcaaggatgcctcccgccgtttccagcggacgtcttcatggtcccacagtatggatacctcaccctgaacaacgggagtcaggcggtaggacgctcctccttttactgcctggagtactttccttctcagatgcttcgtaccggaaacaactttaccttcagttacacctttgaagacgttcctttccacagcagctacgctcacagtcaaagtctggaccggctgatgaatcctcttatcgaccagtacctgtattatctaaacaaaacacaatcaaatagtggaactcttcagcagtctcggctactgtttagtcaagctggacctaccagcatgtctcttcaagctaaaaactggctgcctggaccttgctacagacaacagcgtctgtcaaagcaggcaaacgacaacaacaacagcaactttccctggactgtggctacaaagtatcatctaaatggccgggactcgttggttaatccaggaccagctatggccagccacaaagacgatgaagaaaagtttttccccatgcatggaaccctgatatttggcaaacaaggaacaaatgctaacgacgcggatttggacaatgtcatgattacagatgaagaagaaatccgtaccaccaatcccgtggctacggagcagtacgggactgtgtcaaataatttgcaaaactcaaatactggtccaactactggaactgtcaatcaccaaggagcgttacctggtatggtgtggcaggatcgagacgtgtaccttcagggacccatttgggccaagattcctcacaccgatggacactttcacccttctccgctgatgggaggttttggactcaaacacccgcctcctcagatcatgatcaaaaacactcccgttccagccaatcctcccacaaacttcagttctgccaagtttgcttctttcatcacacagtattccacgggacaggttagcgtggagatcgagtgggagctgcagaaggagaacagcaaacgctggaaccccgagacccagtacacttccaactacaacaagtctgttaatgtggactttactgtggacactaatggtgtgtattcagagcctcgccccattggcaccagatacctgactcgtaatctgtaa

SEQ ID NO: 3660 - DNA, 2208 bp, Artificial Sequence
  source: /note="Description of Artificial Sequence: Synthetic polynucleotide"
atggctgccgatggttatcttccagattggctcgaggacactctctctgaaggaataagacagtggtggaagctcaaacctggcccaccaccgccaaagcccgcagagcggcataaggacgacagcaggggtcttgtgcttcctgggtacaagtacctcggacccttcaacggactcgacaagggagagccggtcaacgaggcaaacgccgcggccctcgagcacgacaaggcctacgaccggcagctcgacagcggagacaacccgtacctcaagtacaaccacgccgacgcggagtttcaggagcgccttaaagaagatacgtcttttgggggcaacctcggacgagcagtattccaggcgaaaaagagggttcttgaacctctgggcctggttgaggagcctgttaagacggctccgggaaaaaagaggccggtagagcactctcctgtggagccagactcctcctcgggaaccggaaaagcgggccagcagcctgcgagaaagagattgaattttggtcagactggagacgcagactccgtacctgacccccagcctctcggacagccaccagcagcccccacaagtttgggatctactacaatggctacaggcagtggcgcaccaatggcagacaataacgagggtgccgatggagtgggtaattcctcaggaaattggcattgcgattcccaatggtcgggcgacagagtcatcaccaccagcacccgaacctgggccctgcccacctacaacaaccacctctacaagcaaatctccagccaatcaggagccagcaacgacaaccactactttggctacagcaccccctgggggtattttgacttcaacagattccactgccgcttttcaccacgtgactggcaaagactcatcaacaacaactggggattccgacccaagagactcaacttcaagctccttaacattcaagtcaaagaggtcacgcagaatgacggtacgacgacgattgccaataaccttaccagcacggttcaggtgtttactgactcggagtaccagctcccgtacgtcctcggctcggcgcatcaaggatgcctcccgccgtttccagcggacgtcttcatggtcccacagtatggatacctcaccctgaacaacgggagtcaggcggtaggacgctcttccttttactgcctggagtactttccttctcagatgcttcgtaccggaaacaactttaccttcagttacacctttgaagacgttcctttccacagcagctacgctcacagtcaaagtctggaccggctgatgaatcctcttatcgaccagtacctgtattatctaaacaaaacacaatcaaatagtggaactcttcagcagtctcggctactgtttagtcaagctggacctaccagcatgtctcttcaagctaaaaactggctgcctggaccttgctacagacaacagcgtctgtcaaagcaggcaaacgacaacaacaacagcaactttccctggactgcggctacaaagtatcatctaaatggccgggactcgttggttaatccaggaccagctatggccagccacaaagacgatgaagaaaagtttttccccatgcatggaaccctgatatttggcaaacaaggaacaaatgctaacgacgcggatttggacaatgtcatggttacagatgaagaagaaatccgtaccaccaatcccgtggctacggagcagtacgggactgtgtcaaataatttgcaaaactcaaatactggtccaactactggaactgtcaatcaccaaggagcgttacctggtatggtgtggcaggatcgagacgtgtaccttcagggacccatttgggccaagattcctcacaccgatggacactttcacccttctccgctgatgggaggttttggactcaaacacccgcctcctcagatcatgatcaaaaacactcccgttccagccaatcctcccacaaacttcagttctgccaagtttgcttctttcatcacacagtattccacgggacaggttagcgtggagatcgagtgggagctgcagaaggagaacagcaaacgctggaaccccgagacccagtacacttccaactacaacaagtctgttaatgtggactttactgtggacactaatggtgtgtattcagagcctcgccccattggcaccagatacctgactcgtaatctgtaa

SEQ ID NO: 3661 - DNA, 2208 bp, Artificial Sequence
  source: /note="Description of Artificial Sequence: Synthetic polynucleotide"
atggctgccgatggttatcttccagattggctcgaggacactctctctgaaggaataagacagtggtggaagctcaaacctggcccaccaccgccaaagcccgcagagcggcataaggacgacagcaggggccttgtgcttcctgggtacaagtacctcggacccttcaacggactcgacaagggagagccggtcaacgaggcagacgccgcggccctcgagcacgacaaggcctacgaccggcagctcgacagcggagacaacccgtacctcaagtacaaccacgccgacgcggagtttcaggagcgccttaaagaagatacgtcttttgggggcaacctcggacgagcagtattccaggcgaaaaagagggttcttgaacctctgggcctggttgaggagcctgttaagacggctccgggaaaaaagaggccggtagagcactctcctgtggagccagactcctcctcgggaaccggaaaagcgggccagcagcctgcgagaaagggattgaattttggtcagactggagacgcagactccgtacctgacccccggcctctcggacagccaccagcagcccccgcaagtttgggatctactacaatggctacaggcagtggcgcaccaatggcagacaataacgagggtgccgatggagtgggtaattcctcaggaaattggcattgcgattcccaatggttgggcgacagagtcatcaccaccagcacccgaacctgggccctgcccacctacaacaaccacctctacaagcaaatctccagccaatcaggagccagcaacgacaaccactactttggctacagcaccccctgggggtattttgacttcaacagattccactgccacttttcaccacgtgactggcaaagactcatcaacaacaactggggattccgacccaagagactcaacttcaagctctttaacattcaagtcaaagaggtcacgcagaatgacggtacgacgacgattgccaataaccttaccagcacggttccggtgtttactgactcggagtaccagctcccgtacgtcctcggctcggcgcatcaaggatgcctcccgccgtttccagcggacgtcttcatggtcccacagtatggatacctcaccctgaacaacgggagtcaggcggtaggacgctcttccttttactgcctggagtactttccttctcagatgcttcgtaccggaaacaactttaccttcagttacacctttgaagacgttcctttccacagcagctacgctcacagtcaaagtctggaccggctgatgaatcctcttatcgaccagtacctgtattatctaaacaaaacacaatcaaatagtggaactcttcagcagtctcggctactgtttagtcaagctggacctaccagcatgtctctccaagctaaaaactggctgcctggaccttactacagacaacagcgtctgtcaaagcaggcaaacgacaacaacaacagcaactttccctggactgcggctacaaagtatcatccaaatggccgggactcgttggttgatccaggaccagctatggccagccacaaagacgatgaagaaaagtttttccccatgcatggaaccctgatatttggcaaacaagggacaaatgctaacgacgcggatttggacaatgtcatgattacagatgaagaagaaatccgtaccaccaatcccgtggctacggggcagtacgggactgtgtcaaataatttgcaaaactcaaatactggtccaactactggaactgtcaatcaccaaggagcgttacctggtatggtgtggcaggatcgagacgtgtaccttcagggacccatttgggccaagattcctcacaccgatggacactttcacccttctccgctgatgggaggttttggactcaaacacccgcctcctcagatcatggtcaaaaacactcccgttccagccaatcctcccacaaacttcagttctgccaagtttgtttctttcatcacacggtattccacgggacaggttagcgtggagatcgagtgggagctgcagaaggagaacagcaaacgctggaaccccgagatccagtacacttccaactacaacaagtctgttaatgtggactttactgtggacactaatggtgtgtattcagagcctcgccccattggcaccagatacctgactcgtaatctgtaa

SEQ ID NO: 3662 - DNA, 2208 bp, Artificial Sequence
  source: /note="Description of Artificial Sequence: Synthetic polynucleotide"
atggctgccgatggttatcttccagattggctcgaggacactctctctgaaggaataagacagtggtggaagctcaaacctggcccaccaccgccaaagcccgcagagcggcataaggacgacagcaggggtcttgtgcttcctgggtacaagtacctcggacccttcaacggacccgacaagggagagccggtcaacgaggcagacgccgcggccctcgagcacgacaaggcctacgaccggcagctcgacagcggagacaacccgtacctcaagtacaaccacgccgacgcggagtttcaggagcgccttaaagaagatacgtcttttgggggcaacctcggacgagcagtattccaggcgaaaaagagggttcttgaacctctgggcctggttgaggagcctgttaagacggctccgggaaaaaagaggccggtagagcactctcctgtggagccagactcctcctcgggaaccggaaaagcgggccagcagcctgcgagaaagagattgaattttggtcagactggagacgcagactccgtacctgacccccagcctctcggacagccaccagcagcccccacaagtttgggatctactacaatggctacaggcagtggcgcaccaatggcagacaataacgagggtgccgatggagtgggtaattcctcaggaaattggcattgcgattcccaatggtcgggcgacagagtcatcaccaccagcacccgaacctgggccctgcccacctacaacaaccacctctacaagcaaatctccagccaatcaggagccagcaacgacaaccactactttggctacagcaccccctgggggtattttgacttcaacagattccactgccacttttcaccacgtgactggcaaagactcatcaacaacaactggggattccgacccaagagactcaacttcaagctctttaacattcaagtcaaagaggtcacgcagaatgacggtacgacgacgattgccaataaccttaccagcacggttcaggtgtttactgactcggagtaccagctcccgtacgtcctcggctcggcgcatcaaggatgcctcccgccgtttccagcggacgtcttcatggtcccacagtatggatacctcaccctgaacaacgggagtcaggcggtaggacgctcttccttttactgcctggagtactttccttctcagatgcttcgtaccggaaacaactttaccttcagttacacctttgaagacgttcctttccacagcagctacgctcacagtcaaagtctggaccggctgatgaatcctcttatcgaccagtacctgtattatctaaacaaaacacaatcaaatagtggaactcttcagcagtctcggctactgtttagtcaagctggacctaccagcatgtctcttcaagctaaaaactggctgcctggaccttgctacagacaacagcgtctgtcaaagcaggcaaacgacaacaacaacagcaactttccctggactgcggctacaaagtatcatctaaatggccgggactcgttggttaatccaggaccagctatggccagccacaaagacgatgaagaaaagtttttccccatgcatggaaccctgatatttggcaaacaaggaacaaatgctaacgacgcggatttggacaatgtcatgattacagatgaagaagaaatccgtaccaccaatcccgtggctacggagcagtacgggactgtgtcaaataatttgcaaaactcaaatactggtccaactactggaactgtcaatcaccaaggagcgttacctggtatggtgtggcaggatcgagacgtgtaccttcagggacccatttgggccaagattcctcacaccgatggacactttcacccttctccgctgatgggaggttttggactcaaacacccgcctcctcagatcatgatcaaaaacactcccgttccagccaatcctcccacaaacttcagttctgccaagtttgcttctttcatcacacagtattccacgggacaggttagcgtggagatcgagtgggagctgcagaaggagaacagcaaacgctggaaccccgagatccagtacacttccaactacaacaagtctgttaatgtggactttactgtggacactaatggtgtgtattcagagcctcgccccattggcaccagatacctgactcgtaatctgtaa

SEQ ID NO: 3663 - DNA, 2208 bp, Artificial Sequence
  source: /note="Description of Artificial Sequence: Synthetic polynucleotide"
atggctgccgatggttatcttccagattggctcgaggacactctctctgaaggaataagacagtggtggaagctcaaacctggcccaccaccgccaaagcccgcagagcggcataaggacgacagcaggggtcttgtgcttcctgggtacaagtacctcggacccttcaacggactcgacaagggagagccggtcaacgaggcagacgccgcggccctcgagcacgacaaggcctacgaccggcagctcgacagcggagacaacccgtacctcaagtacaaccacgccgacgcggagtttcaggagcgccttaaagaagatacgtcttttgggggcaacctcggacgagcagtattccaggcgaaaaagagggttcttgaacctctgggcctggttgaggagcctgttaagacggctccgggaaaaaagaggccggtagagcactctcctgtggagccagactcctcctcgggaaccggaaaagcgggccagcagcctgcgagaaagagattgaattttggtcagactggagacgcagactccgtacctgacccccagcctctcggacagccaccagcagcccccacaagtttgggatctactacaatggctacaggcagtggcgcaccaatggcagacaataacgagggtgccgatggagtgggtaattcctcaggaaattggcattgcgattcccaatggtcgggcgacagagtcatcaccaccagcacccgaacctgggccctgcccacctacaacaaccacctctacaagcaaatctccagccaatcaggagccagcaacgacaaccactactttggctacagcaccccctgggggtattttgacttcaacagattccactgccacttttcaccacgtgactggcaaagactcatcaacaacaactggggattccgacccaagagactcaacttcaagctctttaacattcaagtcaaagaggtcacgcagaatgacggtacgacgacgattgccaataaccttaccagcacggttcaggtgtttactgactcggagtaccagctcccgtacgtcctcggctcggcgcatcaaggatgcctcccgccgtttccagcggacgtcttcatggtcccacagtatggatacctcaccctgaacaacgggagtcaggcggtaggacgctcttccttttactgcctggagtactttccttctcagatgcttcgtaccggaaacaactttaccttcagttacacctttgaagacgttcctttccacagcagctacgctcacagtcaaagtctggaccggctgatgaatcctcttatcgaccagtacctgtattatctaaacaaaacacaatcaaatagtggaactcttcagcagtctcggctactgtttagtcaagctggacctaccagcatgtctcttcaagctaaaaactggctgcctggaccttgctacagacaacagcgtctgtcaaagcaggcaaacgacaacaacaacagcaactttccctggactgcggctacaaagtatcatctaaatggccgggactcgttggttaatccaggaccagctatggccagccacaaagacgatgaagaaaagtttttccccatgcatggaaccctgatatttggcaaacaaggaacaaatgctaacgacgcggatttggacaatgtcatgattacagatgaagaagaaatccgtaccaccaatcccgtggctacggagcagtacgggactgtgtcaaataatttgcaaaactcaaatactggtccaactactggaactgtcaatcaccaaggagcgttacctggtatggtgtggcaggatcgagacgtgtaccttcagggacccatttgggccaagattcctcacaccgatggacactttcacccttctccgctgatgggaggttttggactcaaacacccgcctcctcagatcatgatcaaaaacactcccgttccagccaatcctcccacaaacttcagttctgccaagtttgcttctttcatcacacagtattccacgggacaggttagcgtggagatcgagtgggagctgcagaaggagaacagcaaacgctggaaccccgagacccagtacacttccaactacaacaagtctgttaatgtggactttactgtggacactaatggtgtgtattcagagcctcgccccattggcaccagatacctgactcgtaatctgtaa

SEQ ID NO: 3664 - DNA, 2208 bp, Artificial Sequence
  source: /note="Description of Artificial Sequence: Synthetic polynucleotide"
atggctgccgatggttatcttccagattggctcgaggacactctctctgaaggaataagacagtggtggaagctcaaacctggcccaccaccgccaaagcccgcagagcggcataaggacgacagcaggggccttgtgcttcctgggtacaagtacctcggacccttcaacggactcgacaagggagagccggtcaacgaggcagacgccgcggccctcgagcacgacaaggcctacgaccggcagctcgacagcggagacaacccgtacctcaagtacaaccacgccgacgcggagtttcaggagcgccttaaagaagatacgtcttttgggggcaacctcggacgagcagtattccaggcgaaaaagagggttcttgaacctctgggcctggttgaggagcctgttaagacggctccgggaaaaaagaggccggtagagcactctcctgtggagccagactcctcctcgggaaccggaaaagcgggccagcagcctgcgagaaagggattgaattttggtcagactggagacgcagactccgtacctgacccccggcctctcggacagccaccagcagcccccgcaagtttgggatctactacaatggctacaggcagtggcgcaccaatggcagacaataacgagggtgccgatggagtgggtaattcctcaggaaattggcattgcgattcccaatggttgggcgacagagtcatcaccaccagcacccgaacctgggccctgcccacctacaacaaccacctctacaagcaaatctccagccaatcaggagccagcaacgacaaccactactttggctacagcaccccctgggggtattttgacttcaacagattccactgccacttttcaccacgtgactggcaaagactcatcaacaacaactggggattccgacccaagagactcaacttcaagctctttaacattcaagtcaaagaggtcacgcagaatgacggtacgacgacgattgccaataaccttaccagcacggttccggtgtttactgactcggagtaccagctcccgtacgtcctcggctcggcgcatcaaggatgcctcccgccgtttccagcggacgtcttcatggtcccacagtatggatacctcaccctgaacaacgggagtcaggcggtaggacgctcttccttttactgcctggagtactttccttctcagatgcttcgtaccggaaacaactttaccttcagttacacctttgaagacgttcctttccacagcagctacgctcacagtcaaagtctggaccggctgatgaatcctcttatcgaccagtacctgtattatctaaacaaaacacaatcaaatagtggaactcttcagcagtctcggctactgtttagtcaagctggacctaccagcatgtctctccaagctaaaaactggctgcctggaccttactacagacaacagcgtctgtcaaagcaggcaaacgacaacaacaacagcaactttccctggactgcggctacaaagtatcatccaaatggccgggactcgttggttgatccaggaccagctatggccagccacaaagacgatgaagaaaagtttttccccatgcatggaaccctgatatttggcaaacaagggacaaatgctaacgacgcggatttggacaatgtcatgattacagatgaagaagaaatccgtaccaccaatcccgtggctacggrgcagtacgggactgtgtcaaataatttgcaaaactcaaatactggtccaactactggaactgtcaatcaccaaggagcgttacctggtatggtgtggcaggatcgagacgtgtaccttcagggacccatttgggccaagattcctcacaccgatggacactttcacccttctccgctgatgggaggttttggactcaaacacccgcctcctcagatcatggtcaaaaacactcccgttccagccaatcctcccacaaacttcagttctgccaagtttgcttctttcatcacacggtattccacgggacaggttagcgtggagatcgagtgggagctgcagaaggagaacagcaaacgctggaaccccgagatccagtacacttccaactacaacaagtctgttaatgtggactttactgtggacactaatggtgtgtattcagagcctcgccccattggcaccagatacctgactcgtaatctgtaa

SEQ ID NO: 3665 - DNA, 2208 bp, Artificial Sequence
  source: /note="Description of Artificial Sequence: Synthetic polynucleotide"
atggctgccgatggttatcttccagattggctcgaggacactctctctgaaggaataagacagtggtggaagctcaaacctggcccaccaccgccaaagcccgcagagcggcataaggacgacagcaggggtcttgtgcttcctgggtacaagtacctcggacccttcaacggactcgacaagggagagccggtcaacgaggcagacgccgcggcccccgagcacgacaaggcctacgaccggcagctcgacagcggagacaacccgtaccccaagtacaaccacgccgacgcggagtttcaggagcgccttaaagaagatacgtcttttgggggcaacctcggacgagcagtattccaggcgaaaaagagggttcttgaacctctgggcctggttgaggagcctgttaagacggctccgggaaaaaagaggccggtagagcactctcctgtggagccagactcctcctcgggaaccggaaaagcgggccagcagcctgcgagaaagagattgaattttggtcagactggagacgcagactccgtacctgacccccagcctctcggacagccaccagcagcccccacaagtttgggatctactacaatggctacaggcagtggcgcaccaatggcagacaataacgagggtgccgatggagtgggtaattcctcaggaaattggcattgcgattcccaatggtcgggcgacagagtcatcaccaccagcacccgaacctgggccctgcccacctacaacaaccacctctacaagcaaatctccagccaatcaggagccagcaacgacaaccactactttggctacagcaccccctgggggtattttgacttcaacagattccactgccacttttcaccacgtgactggcaaagactcatcaacaacaactggggattccgacccaagagactcaacttcaagctctttaacattcaagtcaaagaggtcacgcagaatgacggtacgacgacgattgccaataaccttaccagcacggttcaggtgtttactgactcggagtaccagctcccgtacgtcctcggctcggcgcatcaaggatgcctcccgccgtttccagcggacgtcttcatggtcccacagtatggatacctcaccctgaacaacgggagtcaggcggtaggacgctcttccttttactgcctggagtactttccttctcagatgcttcgtaccggaaacaactttaccttcagttacacctttgaagacgttcctttccacagcagctacgctcacagtcaaagtctggaccggctgatgaatcctcttatcgaccagtacctgtattatctaaacaaaacacaatcaaatagtggaactcttcagcagtctcggctactgtttagtcaagctggacctaccagcatgtctcttcaagctaaaaactggctgcctggaccttgctacagacaacagcgtctgtcaaagcaggcaaacgacaacaacaacagcaactttccctggactgcggctacaaagtatcatctaaatggccgggactcgttggttaatccaggaccagctatggccagccacaaagacgatgaagaaaagtttttccccatgcatggaaccctgatatttggcaaacaaggaacaaatgctaacgacgcggatttggacaatgtcatgattacagatgaagaagaaatccgtaccaccaatcccgtggctacggagcagtacgggactgtgtcaaataatttgcaaaactcaaatactggtccaactactggaactgtcaatcaccaaggagcgttacctggtatggtgtggcaggatcgagacgtgtaccttcagggacccatttgggccaagattcctcacaccgatggacactttcacccttctccgctgatgggaggttttggactcaaacacccgcctcctcagatcatgatcaaaaacactcccgttccagccaatcctcccacaaacttcagttctgccaagtttgcttctttcatcacacagtattccacgggacaggttagcgtggagatcgagtgggagctgcagaaggagaacagcaaacgctggaaccccgagatccagtacacttccaactacaacaagtctgttaatgtggactttactgtggacactaatggtgtgtattcagagcctcgccccattggcaccagatacctgactcgtaatctgtaa

SEQ ID NO: 3666 - DNA, 2208 bp, Artificial Sequence
  source: /note="Description of Artificial Sequence: Synthetic polynucleotide"
atggctgccgatggttatcttccagattggctcgaggacactctctctgaaggaataagacagtggtggaagctcaaacctggcccaccaccgccaaagcccgcagagcggcataaggacgacagcaggggtcttgtgcttcctgggtataagtacctcggacccttcaacggactcgacaagggagagccggtcaacgaggcagacgccgcggccctcgagcacgacaaggcctacgaccggcagctcgacagcggagacaacccgtacctcaagtacaaccacgccgacgcggagtttcaggagcgccttaaagaagatacgtcttttgggggcaacctcggacgagcagtattccaggcgaaaaagagggttcttgaacctctgggcctggttgtggagcctgttaagacggctccgggaaaaaagaggccggtagagcactctcctgtggagccagactcctcctcgggaaccggaaaagcgggccagcagcctgcgagaaagagattgaattttggtcagactggagacgcagactccgtacctgacccccagcctctcggacagccaccagcagcccccacaagtttgggatctactacaatggctacaggcagtggcgcaccaatggcagacaataacgagggtgccgatggagtgggtaattcctcaggaaattggcattgcgattcccaatggtcgggcgacagagtcatcaccaccagcacccgaacctgggccctgcccacctacaacaaccacctctacaagcaaatctccagccgatcaggagccagcaacgacaaccactactttggctacagcaccccctgggggtattttgacttcaacggattccactgccacttttcaccacgtgactggcaaagactcatcaacaacaactggggattccgacccaagagactcaacttcaagctctttaacattcaagtcaaagaggtcacgcagaatgacggtacgacgacgattgccaataaccttaccagcacggttcaggtgtttactgactcggagtaccagctcccgcacgtcctcggctcggcgcatcaaggatgcctcccgccgtttccagcggacgtcttcatggtcccacagtatggatacctcaccctgaacaacgggagtcaggcggtaggacgctcttccttttactgcccggagtactttccttctcagatgcttcgtaccggaaacaactttaccttcagttacacctttgaagacgttcctttccacagcagctacgctcacagtcaaagtctggaccggctgatgaatcctcttatcgaccagtacctgtattatctaaacaaaacacaatcaaatagtggaactcttcagcagtctcggctactgtttagtcaagctggacctaccagcatgtctcttcaagctaaaaactggctgcctggaccttgctacagacaacagcgtctgtcaaagcaggcaaacggcaacaacaacagcaactttccctggactgcggctacaaagtatcatctaaatggccgggactcgttggttaatccaggaccagctatggccagccacaaagacgatgaagaaaagtttttccccatgcatggaaccctgatatttggcaaacaaggaacaaatgctaacgacgcggatttggacaatgtcatgattacagatgaagaagaaatccgtaccaccaatcccgtggctacggagcagtacgggactgtgtcaaataatttgcaaaactcaaatactggtccaactactggaactgtcaatcaccaaggagcgttacctggtatggtgtggcaggatcgagacgtgtaccttcagggacccatttgggccaagattcctcacaccgatggacactttcacccttctccgctgatgggaggttttggactcaaacacccgcctcctcagatcatgatcaaaaacactcccgttccagccaatcctcccacaaacttcagttctgccaagtttgcttctttcatcacacagtattccacgggacaggttagcgtggagatcgagtgggagctgcagaaggagaacagcaaacgctggaaccccgagatccagtacacttccaactacaacaagtctgttaatgtggactttactgtggacactaatggtgtgtattcagagcctcgccccattggcaccagatacctgactcgtaatctgtaa

SEQ ID NO: 3667 - DNA, 2208 bp, Artificial Sequence
  source: /note="Description of Artificial Sequence: Synthetic polynucleotide"
atggctgccgatggttatcttccagattggctcgaggacactctctctgaaggaataagacagtggtggaagctcaaacctggcccaccgccgccaaagcccgcagagcggcataaggacgacagcaggggtcttgtgcttcctgggtacaagtacctcggacccttcaacggactcgacaagggagagccggtcaacgaggcagacgccgcggccctcgagcacgacaaggcctacgaccggcagctcgacagcggagacaacccgtacctcaagtacaaccacgccgacgcggagtttcaggagcgccttaaagaagatacgtcttttgggggcaacctcggacgagcagtattccaggcgaaaaagagggttcttgaacctctgggcctggttgaggagcctgttaagacggttccgggaaaaaagaggccggtagagcactctcctgtggagccagactcctcctcgggaaccggaaaagcgggccagcagcctgcgagaaagagattgaattttggtcagactggagacgcagactccgtacctgacccccagcctctcggacagccaccagcagcccccacaagtttgggatctactacaatggctacaggcagtggcgcaccaatggcagacaataacgagggtgccgatggagtgggtaattcctcaggaaattggcattgcgattcccaatggtcgggcgacagagtcatcaccaccagcacccgaacctgggccctgcccacctacaacaaccacccctacaagcaaatctccagccaatcaggagccagcaacgacaaccactactttggctacagcaccccctgggggtattttgacttcaacagattccactgccacttttcaccacgtgactggcaaagactcatcaacaacaactggggattccgacccaagagactcaacttcaagctctttaacattcaagtcaaagaggtcacgcagaatgacggtacgacgacgattgccaataaccttaccagcacggttcaggtgtttactgactcggagtaccagctcccgtacgtcctcggctcggcgcatcaaggacgcctcccgccgtttccagcggacgtcttcatggtcccacagtatggatacctcaccctgaacaacgggagtcaggcggtaggacgctcttccttttactgcctggagtactttccttctcagatgcttcgtaccggaaacaactttaccttcagttacacctttgaagacgttcctttccacagcagctacgctcacagtcaaagtctggaccggctgatgaatcctcttatcgaccagtacctgtattatctaaacaaaacacaatcaaatagtggaactcttcagcagtctcggctactgtttagtcaagctggacctactagcatgtctcttcaagctaaaaactggctgcctggaccttgctacagacaacagcgtctgtcaaagcaggcagacgacaacaacaacagcaactttccctggactgcggctacaaagtatcatctaaatggccgggactcgttggttaatccaggaccagctatggccagccacaaagacgatgaagaaaagtttttccccatgcatggaaccctgatatttggcaaacaaggaacaaatgctaacgacgcggatttggacaatgtcatgattacagatgaagaagaaatccgtaccaccaatcccgtggctacggagcagtacgggactgtgtcaaataatttgcaaaactcaaatactggtccaactactggaactgtcaatcaccaaggagcgttacctggtatggtgtggcaggatcgagacgtgtaccttcagggacccatttgggccaagattcctcacaccgatggacactttcacccttctccgctgatgggaggttttggactcaaacacccgcctcctcagatcatgatcaaaaacactcccgttccagccaatccccccacaaacttcagttctgccaagtttgcttctttcatcacacagtattccacgggacaggttagcgtggagatcgagtgggagctgcagaaggagaacagcaaacgctggaaccccgagatccagtacacttccaactacaacaagtctgttaatgtggactttactgtggacgctaatggtgtgtattcagagcctcgccccattggcaccagatacctgactcgtaatctgtaa

SEQ ID NO: 3668 - DNA, 2208 bp, Artificial Sequence
  source: /note="Description of Artificial Sequence: Synthetic polynucleotide"
atggctgccgatggttatcttccagattggctcgaggacactctctctgaaggaataagacagtggtggaagctcaaacctggcccaccaccgccaaagcccgcagagcggcataaggacgacagcaggggtcttgtgctttctgggtacaagtacctcggacccttcaacggactcgacaagggagagccggtcaacgaggcagacgccgcggccctcgagcacgacaaggcctacgaccggcagctcgacagcggagacaacccgtacctcaagtacaaccacgccgacgcggagtttcaggagcgccttaaagaagatacgtcttttgggggcaacctcggacgagcagtattccaggcgaaaaagagggttcttgaacctctgggcctggttgaggagcctgttaagacggctccgggaaaaaagaggccggtagagcactctcctgtggagccagactcctcctcgggaaccggaaaagcgggccagcagcctgcgagaaagagattgaattttggtcagactggagacgcagactccgtacctgacccccagcctctcggacagccaccagcagcccccacaagtttgggatctactacaatggctacaggcagtggcgcaccaatggcagacaataacgagggtgccgatggagtgggtaattcctcaggaaattggcattgcgattcccaatggtcgggcgacagagtcatcaccaccagcacccgaacctgggccctgcccacctacaacaaccacctctacaagcaaatctccagccaatcaggagccagcaacgacaaccactactttggctacagcaccccctgggggtattttgacttcaacagattccactgccacttttcaccacgtgactggcaaagactcatcaacaacaactggggattccgacccaagagactcaacttcaagctctttaacattcaagtcaaagaggtcacgcagaatgacggtacgacgacgattgccaataaccttaccagcacggttcaggtgtttactgactcggagtaccagctcccgtacgtcctcggctcggcgcatcaaggatgcctcccgccgtttccagcggacgtcttcatggtcccacagtatggatacctcaccctgaacaacgggagtcaggcggtaggacgctcttccttttactgcctggagtactttccttctcagatgcttcgtaccggaaacaactttaccttcagttacacctttgaagacgttcctttccacagcagctacgctcacagtcaaagtctggaccggctgatgaatcctcttatcgaccagtacctgtattatctaaacaaaacacaatcaaatagtggaactcttcagcagtctcggctactgtttagtcaagctggacctaccagcatgtctcttcaagctaaaaactggctgcctggaccttgctacagacaacagcgtctgtcaaagcaggcaaacgacaacaacaacagcaactttccctggactgcggctacaaagtatcatctaaatggccgggactcgttggttaatccaggaccagctatggccagccacaaagacgatgaagaaaagtttttccccatgcatggaaccctgatatttggcaaacaaggaacaaatgctaacgacgcggatttggacaatgtcatgattacagatgaagaagaaatccgtaccaccaatcccgtggctacggagcagtacgggactgtgtcaaataatttgcaaaactcaaatactggtccaactactggaactgtcaatcaccaaggagcgttacctggtatggtgtggcaggatcgagacgtgtaccttcagggacccatttgggccaagattcctcacaccgatggacactttcacccttctccgctgatgggaggttttggactcaaacacccgcctcctcagatcatgatcaaaaacactcccgttccagccaatccccccacaaacttcagttctgccaagtttgcttctttcatcacacagtattccacgggacaggttagcgtggagatcgagtgggagctgcagaaggagaacagcaaacgctggaaccccgagatccagtacacttccaactacaacaagtctgttaatgtggactttactgtggacactaatggtgtgtattcagagcctcgccccattggcaccagatacctgactcgtaatctgtaa

SEQ ID NO: 3669 - DNA, 2208 bp, Artificial Sequence
  source: /note="Description of Artificial Sequence: Synthetic polynucleotide"
atggctgccgatggttatcttccagattggctcgaggacactctctctgaaggaataagacagtggtggaagctcaaacctggcccaccaccgccaaagcccgcagagcggcataaggacgacagcaggggtcttgtgcttcctgggtacaagtacctcggacccttcaacggactcgacaagggagagccggtcaacgaggcagacgccgcggccctcgagcacgacaaggcctacgaccggcagctcgacagcggagacaacccgtacctcaagtacaaccacgccgacgcggagtttcaggagcgccttaaagaagatacgtcttttgggggcaacctcggacgagcagtattccaggcgaaaaagagggttcttgaacctctgggcctggttgaggagcctgttaagacggctccgggaaaaaagaggccggtagagcactctcctgtggagccagactcctcctcgggaaccggaaaagcgggccagcagcctgcgagaaagagattgaattttggtcagactggagacgcagactccgtacctgacccccagcctctcggacagccaccagcagcccccacaagtttgggatctactacaatggctacaggcagtggcgcaccaatggcagacaataacgagggtgccgatggagtgggtaattcctcaggaaattggcattgcgattcccaatggtcgggcgacagagtcatcaccaccagcacccgaacctgggccctgcccacctacaacaaccacctctacaagcaaatctccagccaatcaggagccagcaacgacaaccactactttggctacagcaccccctgggggtattttgacttcaacagattccactgccacttttcaccacgtgactggcaaagactcatcaacaacaactggggattccgacccaagagactcaacttcaagctctttaacattcaagtcaaagaggtcacgcagaatgacggtacgacgacgattgccaataaccttaccagcacggttcaggtgtttactgactcggagtaccagctcccgtacgtcctcggctcggcgcatcaaggatgcctcccgccgtttccagcggacgtcttcatggtcccacagtatggatacctcaccctgaacaacgggagtcaggcggtaggacgctcctccttttactgcctggagtactttccttctcagatgcttcgtaccggaaacaactttaccttcagttacacctttgaagacgttcctttccacagcagctgcgctcacagtcaaagtctggaccggctgatgaatcctcttatcgaccagtacctgtattatctaaacaaaacacaatcaaatagtggaactcttcagcagtctcggctactgtttagtcaagctggacctaccagcatgtctcttcaagctaaaaactggctgcctggaccttgctacagacaacagcgtctgtcaaagcaggcaaacgacaacaacaacagcaactttccctggactgcggctacaaagtatcatctaaatggccgggactcgttggttaatccaggaccagctatggccagccacaaagacgatgaagaaaagtttttccccatgcatggaaccctgatatttggcaaacaaggaacaaatgctaacgacgcggatttggacaatgtcatgattacagatgaagaagaaatccgtaccaccaatcccgtggctacggagcagtacgggactgtgtcaaataatttgcaaaactcaaatactggtccaactactggaactgtcaatcaccaaggagcgttacctggtatggtgtggcaggatcgagacgtgtaccttcagggacccatttgggccaagattcctcacaccgatggacactttcacccttctccgctgatgggaggttttggactcaaacacccgcctcctcagatcatgatcaaaaacactcccgttccagccaatcctcccacaaacttcagttctgccaagtttgcttctttcatcacacagtattccacgggacaggttagcgtggagatcgagtgggagctgcagaaggagaacagcaaacgctggaaccccgagatccagtacacttccaactacaacaagtctgttaatgtggactttactgtggacactaatggtgtgtattcagagcctcgccccattggcaccagatacctgactcgtaatctgtaa

SEQ ID NO: 3670 - DNA, 2208 bp, Artificial Sequence
  source: /note="Description of Artificial Sequence: Synthetic polynucleotide"
atggctgccgatggttatcttccagattggctcgaggacactctctctgaaggaataagacagtggtggaagctcaaacctggcccaccaccgccaaagcccgcagagcggcataaggacgacagcaggggtcttgtgcttcctgggtacaagtacctcggacccttcaacggactcgacaagggagagccggtcaacgaggcagacgccgcggccctcgagcacgacaaggcctacgaccggcagctcgacagcggagacaacccgtacctcaagtacaaccacgccgacgcggagtttcaggagcgccttaaagaagatacgtcttttgggggcaacctcggacgagcagtattccaggcgaaaaagagggttcttgaacctctgggcctggttgaggagcctgttaagacggctccgggaaaaaagaggccggtagagcactctcctgtggagccagactcctcctcgggaaccggaaaagcgggccagcagcctgcgagaaagagattgaattttggtcagactggagacgcagactccgtacctgacccccagcctctcggacagccaccagcagcccccacaagtttgggatctactacaatggctacaggcagtggcgcaccaatggcagacaataacgagggtgccgatggagtgggtaattcctcaggaaattggcattgcgattcccaatggtcgggcgacagagtcatcaccaccagcacccgaacctgggccctgcccacctacaacaaccacctctacaagcaaatctccagccaatcaggagccagcaacgacaaccactactttggctacagcaccccctgggggtattttgacttcaacagattccactgccacttttcaccacgtgactggcaaagactcatcaacaacaactggggattccgacccaagagactcaacttcaagctctttaacattcaagtcaaagaggtcacgcagaatgacggtacgacgacgattgccaataaccttaccagcacggttccggtgtttactgactcggagtaccagctcccgtacgtcctcggctcggcgcatcaaggatgcctcccgccgtttccagcggacgtcttcatggtcccacagtatggatacctcaccctgaacaacgggagtcaggcggtaggacgctcttccttttactgcctggagtactttccttctcagatgcttcgtaccggaaacaactttaccttcagttacacctttgaagacgttcctttccacagcagctacgctcacagtcaaagtctggaccggctgatgaatcctcttatcgaccagtacctgtattatctaaacaaaacacaatcaaatagtggaactcttcagcagtctcggctactgtttagtcaagctggacctaccagcatgtctctccaagctaaaaactggctgcctggaccttactacagacaacagcgtctgtcaaagcaggcaaacgacaacaacaacagcaactttccctggactgcggctacaaagtatcatccaaatggccgggactcgttggttgatccaggaccagctatggccagccacaaagacgatgaagaaaagtttttccccatgcatggaaccctgatatttggcaaacaagggacaaatgctaacgacgcggatttggacaatgtcatgattacagatgaagaagaaatccgtaccaccaatcccgtggctacggggcagtacgggactgtgtcaaataatttgcaaaactcaaatactggtccaactactggaactgtcaatcaccaaggagcgttacctggtatggtgtggcaggatcgagacgtgtaccttcagggacccatttgggccaagattcctcacaccgatggacactttcacccttctccgctgatgggaggttttggactcaaacacccgcctcctcagatcatggtcaaaaacactcccgttccagccaatcctcccacaaacttcagttctgccaagtttgcttctttcatcacacggtattccacgggacaggttagcgtggagatcgagtgggagctgcagaaggagaacagcaaacgctggaaccccgagatccagtacacttccaactacaacaagtctgttaatgtggactttactgtggacactaatggtgtgtattcagagcctcgccccattggcaccagatacctgactcgtaatctgtaa

SEQ ID NO: 3671 - DNA, 2208 bp, Artificial Sequence
  source: /note="Description of Artificial Sequence: Synthetic polynucleotide"
atggctgccgatggttatcttccagattggctcgaggacactctctctgaaggaataagacagtggtggaagctcaaacctggcccaccaccgccaaagcccgcagagcggcataaggacgacagcaggggtcttgtgcttcctgggtacaagtacctcggacccttcaacggacccgacaagggagagccggtcaacgaggcagacgccgcggccctcgagcacgacaaggcctacgaccggcagctcgacagcggagacaacccgtacctcaagtacaaccacgccgacgcggagtttcaggagcgccttaaagaagatacgtcttttgggggcaacctcggacgagcagtattccaggcgaaaaagagggttcttgaacctctgggcctggttgaggagcctgttaagacggctccgggaaaaaagaggccggtagagcactctcctgtggagccagactcctcctcgggaaccggaaaagcgggccagcagcctgcgagaaagagattgaattttggtcagactggagacgcagactccgtacctgacccccagcctctcggacagccaccagcagcccccacaagtttgggatctactacaatggctacaggcagtggcgcaccaatggcagacaataacgagggtgccgatggagtgggtaattcctcaggaaattggcattgcgattcccaatggtcgggcgacagagtcatcaccaccagcacccgaacctgggccctgcccacctacaacaaccacctctacaagcaaatctccagccaatcaggagccagcaacgacaaccactactttggctacagcaccccctgggggtattttgacttcaacagattccactgccacttttcaccacgtgactggcaaagactcatcaacaacaactggggattccgacccaagagactcaacttcaggctctttaacattcaagtcaaagaggtcacgcagaatgacggtacgacgacgattgccaataaccttaccagcacggttcaggtgtttactgactcggagtaccagctcccgtacgtcctcggctcggcgcatcaaggatgcctcccgccgtttccagcggacgtcttcatggtcccacagtatggatacctcaccctgaacaacgggagtcaggcggtaggacgctcttccttttactgcctggagtactttccttctcagatgcttcgtaccggaaacaactttaccttcagttacacctttgaagacgttcctttccacagcagctacgctcacagtcaaagtctggaccggctgatgaatcctcttatcgaccagtacctgtattatctaaacaaaacacaatcaaatagtggaactcttcagcagtctcggctactgtttagtcaagctggacctaccagcatgtctcttcaagctaaaaactggctgcctggaccttgctacagacaacagcgtctgtcaaagcaggcaaacgacaacaacaacagcaactttccctggactgcggctacaaagtatcatctaaatggccgggactcgttggttaatccaggaccagctatggccagccacaaagacgatgaagaaaagtttttccccatgcatggaaccctgatatttggcaaacaaggaacaaatgctaacgacgcggatttggacaatgtcatgattacagatgaagaagaaatccgtaccaccaatcccgtggctacggagcagtacgggactgtgtcaaataatttgcaaaactcaaatactggtccaactactggaactgtcaatcaccaaggagcgttacctggtatggtgtggcaggatcgagacgtgtaccttcagggacccatttgggccaagattcctcacaccgatggacactttcacccttctccgctgatgggaggttttggactcaaacacccgcctcctcagatcatgatcaaaaacactcccgttccagccaatccccccacaaacttcagttctgccaagtttgcttctttcatcacacagtattccacgggacaggttagcgtggagatcgagtgggagctgcagaaggagaacagcaaacgctggaaccccgagatccagtacacttccaactacaacaagtctgttaatgtggactttactgtggacactaatggtgtgtattcagagcctcgccccattggcaccagatacctgactcgtaatctgtaa

SEQ ID NO: 3672 - DNA, 2208 bp, Artificial Sequence
  source: /note="Description of Artificial Sequence: Synthetic polynucleotide"
atggctgccgatggttatcttccagattggctcgaggacactctctctgaaggaataagacagtggtggaagctcaaacctggcccaccaccgccaaagcccgcagagcggcataaggacgacagcaggggtcttgtgcttcctgggtacaagtacctcggacccttcaacggacccgacaagggagagccggtcaacgaggcagacgccgcggccctcgagcacgacaaggcctacgaccggcagctcgacagcggagacaacccgtacctcaagtacaaccacgccgacgcggagtttcaggagcgccttaaagaagatacgtcttttgggggcaacctcggacgagcagtattccaggcgaaaaagagggttcttgaacctctgggcctggttgaggagcctgttaagacggctccgggaaaaaagaggccggtagagcactctcctgtggagccagactcctcctcgggaaccggaaaagcgggccagcagcctgcgagaaagagattgaattttggtcagactggagacgcagactccgtacctgacccccagcctctcggacagccaccagcagcccccacaagtttgggatctactacaatggctacaggcagtggcgcaccaatggcagacaataacgagggtgccgatggagtgggtaattcctcaggaaattggcattgcgattcccaatggtcgggcgacagagtcatcaccaccagcacccgaacctgggccctgcccacctacaacaaccacctctacaagcaaatctccagccaatcaggagccagcaacgacaaccactactttggctacagcaccccctgggggtattttgacttcaacagattccactgccacttttcaccacgtgactggcaaagactcatcaacaacaactggggattccgacccaagagactcaacttcaggctctttaacattcaagtcaaagaggtcacgcagaatgacggtacgacgacgattgccaataaccttaccagcacggttcaggtgtttactgactcggagtaccagctcccgtacgtcctcggctcggcgcatcaaggatgcctcccgccgtttccagcggacgtcttcatggtcccacagtatggatacctcaccctgaacaacgggggtcaggcggtaggacgctcttccttttactgcctggagtactttccttctcagatgcttcgtaccggagacaactttaccttcagttacacctttgaagacgttcctttccacagcagctacgctcacagtcaaagtctggaccggctgatgaatcctcttatcgaccagtacctgtattatctaaacaaaacacaatcaaatagtggaactcttcagcagtctcggctactgtttagtcaagctggacctaccagcatgtctcttcaagctaaaaactggctgcctggaccttgctacagacaacagcgtctgtcaaagcaggcaaacgacaacaacaacagcaactttccctggactgcggctacaaagtatcatctaaatggccgggactcgttggttaatccaggaccagctatggccagccacaaagacgatgaagaaaagtttttccccatgcatggaaccctgatatttggcaaacaaggaacaaatgctaacgacgcggatttggacaatgtcatgattacagatgaagaagaaatccgtaccaccaatcccgtggctacggagcagtacgggactgtgtcaaataatttgcaaaactcaaatactggtccaactactggaactgtcaatcaccaaggagcgttacctggtatggtgtggcaggatcgagacgtgtaccttcagggacccatttgggccaagattcctcacaccgatggacactttcacccttctccgctgatgggaggttttggactcaaacacccgcctcctcagatcatgatcaaaaacactcccgttccagccaatcctcccacaaacttcagttctgccaagtttgcttctttcatcacacagtattccacgggacaggttagcgtggagatcgagtgggagctgcagaaggagaacagcaaacgctggaaccccgagatccagtacacttccaactacaacaagtctgttaatgtggactttactgtggacactaatggtgtgtattcagagcctcgccccattggcaccagatacctgactcgtaatctgtaa

SEQ ID NO: 3673 - DNA, 2208 bp, Artificial Sequence
  source: /note="Description of Artificial Sequence: Synthetic polynucleotide"
atggctgccgatggttatcttccagattggctcgaggacactctctctgaaggaataagacagtggtggaagctcaaacctggcccaccaccgccaaagcccgcagagcggcataaggacgacagcaggggtcttgtgcttcctgggtacaagtacctcggacccttcaacggactcgacaagggagagccggtcaacgaggcagacgccgcggccctcgagcacgacaaggcctacgaccggcagctcgacagcggagacaacccgtacctcaagtacaaccacgccgacgcggagtttcaggagcgccttaaagaagatacgtcttttgggggcaacctcggacgagcagtattccaggcgaaaaagagggttcttgaacctctgggcctggttgaggagcctgttaagacggctccgggaaaaaagaggccggtagagcactctcctgtggagccagactcctcctcgggaaccggaaaagcgggccagcagcctgcgagaaagagattgaattttggtcagactggagacgcagactccgtacctgacccccagcctctcggacagccaccagcagcccccacaagtttgggatctactacaatggctacaggcagtggcgcaccaatggcagacaataacgagggtgccgatggagtgggtaattcctcaggaaattggcattgcgattcccaatggtcgggcgacagagtcatcaccaccagcacccgaacctgggccctgcccacctacaacaaccacctctacaagcaaatctccagccaatcaggagccagcaacgacaaccactactttggctacagcaccccctgggggtattttgacttcaacagattccactgccacttttcaccacgtgactggcaaagactcatcaacaacaactggggattccgacccaagagactcaacttcaagctctttaacattcaagtcaaagaggtcacgcagaatgacggtacgacgacgattgccaataaccttaccagcacggttcaggtgtttactgactcggagtaccagctcccgtacgtcctcggctcggcgcatcaaggatgcctcccgccgtttccagcggacgtcttcatggtcccacagtatggatacctcaccctgaacaacgggagtcaggcggtaggacgctcttccttttactgcctggagtactttccttctcagatgcttcgtaccggaaacaactttaccttcagttacacctttgaagacgttcctttccacagcagttacgctcacagtcaaagtctggaccggctgatgaatcctcttatcgaccagtacctgtattatctaaacaaaacacaatcaaatagtggaactcttcagcagtctcggctactgtttagtcaagctggacctaccagcatgtctcttcaagctaaaaactggctgcctggaccttgctacagacaacagcgtctgtcaaagcaggcaaacgacaacaacaacagcaactttccctggactgcggctacaaagtatcatctaaatggccgggactcgttggttaatccaggaccagctatggccagccacaaagacgatgaagaaaagtttttccccatgcatggaaccctgatatttggcaaacaaggaacaaatgctaacgacgcggatttggacaatgccatgattacagatgaagaagaaatccgtaccaccaatcccgtggctacggagcagtacgggactgtgtcaaataatttgcaaaactcaaatactggtccaactactggaactgtcaatcaccaaggagcgttacctggtatggtgtggcaggatcgagacgtgtaccttcagggacccatttgggccaagattcctcacaccgatggacactttcacccttctccgctgatgggaggttttggactcaaacacccgcctcctcagatcatgatcaaaaacactcccgttccagccaatcctcccacaaacttcagttctgccaagtttgcttctttcatcacacagtattccacgggacaggttagcgtggagatcgagtgggagctgcagaaggagaacagcaaacgctggaaccccgagatccagtacacttccaactacaacaagtctgttaatgtggactttactgtggacactaatggtgtgtattcagagcctcgccccattggcaccagatacctgactcgtaatctgtaa

SEQ ID NO: 3674 - DNA, 2208 bp, Artificial Sequence
  source: /note="Description of Artificial Sequence: Synthetic polynucleotide"
atggctgccgatggttatcttccagattggctcgaggacactctctctgaaggaataagacagtggtggaagctcaaacctggcccaccaccgccaaagcccgcagagcggcataaggacgacagcaggggtcttgtgcttcctgggtacaagtacctcggacccttcaacggactcgacaagggagagccggtcaacgaggcaaacgccgcggccctcgagcacgacaaggcctacgaccggcagctcgacagcggagacaacccgtacctcaagtacaaccacgccgacgcggagtttcaggagcgccttaaagaagatacgtcttttgggggcaacctcggacgagcagtattccaggcgaaaaagagggttcttgaacctctgggcctggttgaggagcctgttaagacggctccgggaaaaaagaggccggtagagcactctcctgtggagccagactcctcctcgggaaccggaaaagcgggccagcagcctgcgagaaagagattgaattttggtcagactggagacgcagactccgtacctgacccccagcctctcggacagccaccagcagcccccacaagtttgggatctactacaatggctacaggcagtggcgcaccaatggcagacaataacgagggtgccgatggagtgggtaattcctcaggaaattggcattgcgattcccaatggtcgggcgacagagtcatcaccaccagcacccgaacctgggccctgcccacctacaacaaccacctctacaagcaaatctccagccaatcaggagccagcaacgacaaccactactttggctacagcaccccctgggggtattttgacttcaacagattccactgccacttttcaccacgtgactggcaaagactcatcaacaacaactggggattccgacccaagagactcaacttcaagctctttaacattcaagtcaaagaggtcacgcagaatgacggtacgacgacgattgccaataaccttaccagcacggttcaggtgtttactgactcggagtaccagctcccgtacgtcctcggctcggcgcatcaaggatgcctcccgccgtttccagcggacgtcttcatggtcccacagtatggatacctcaccctgaacaacgggagtcaggcggtaggacgctcttccttttactgcctggagtactttccttctcagatgcttcgtaccggaaacaactttaccttcagttacacctttgaagacgttcctttccacagcagctacgctcacagtcaaagtctggaccggctgatgaatcctcttatcgaccagtacctgtattatctaaacaaaacacaatcaaatagtggaactcttcagcagtctcggctactgtttagtcaagctggacctaccagcatgtctcttcaagctaaaaactggctgcctggaccttgctacagacaacagcgtctgtcaaagcaggcaaacgacaacaacaacagcaactttccctggactgcggctacaaagtatcatctaaatggccgggactcgttggttaatccaggaccagctatggccagccacaaagacgatgaagaaaagtttttccccatgcatggaaccctgatatttggcaaacaaggaacaaatgctaacgacgcggatttggacaatgtcatgattacagatgaagaagaaatccgtaccaccaatcccgtggctacggagcagtacgggactgtgtcaaataatttgcaaaactcaaatactggtccaactactggaactgtcaatcaccaaggagcgttacctggtatggtgtggcaggatcgagacgtgtaccttcagggacccatttgggccaagattcctcacaccgatggacactttcacccttctccgctgatgggaggttttggactcaaacacccgcctcctcagatcatgatcaaaaacactcccgttccagccaatcctcccacaaacttcagttctgccaagtttgcttctttcatcacacagtattccacgggacaggttagcgtggagatcgagtgggagctgcagaaggagaacagcaaacgctggaaccccgagacccagtacacttccaactacaacaagtctgttaatgtggactttactgtggacactaatggtgtgtattcagagcctcgccccattggcaccagatacctgactcgtaatctgtaa

SEQ ID NO: 3675 - DNA, 2208 bp, Artificial Sequence
  source: /note="Description of Artificial Sequence: Synthetic polynucleotide"
atggctgccgatggttatcttccagattggctcgaggacactctctctgaaggaataagacagtggtggaagctcaaacctggcccaccaccgccaaagcccgcagagcggcataaggacgacagcaggggtcttgtgcttcctgggtacaagtacctcggacccttcaacggacccgacaagggagagccggtcaacgaggcagacgccgcggccctcgagcacgacaaggcctacgaccggcagctcgacagcggagacaacccgtacctcaagtacaaccacgccgacgcggagtttcaggagcgccttaaagaagatacgtcttttgggggcaacctcggacgagcagtattccaggcgaaaaagagggttcttgaacctctgggcctggttgaggagcctgttaagacggctccgggaaaaaagaggccggtagagcactctcctgtggagccagactcctcctcgggaaccggaaaagcgggccagcagcctgcgagaaagagattgaattttggtcagactggagacgcagactccgtacctgacccccagcctctcggacagccaccagcagcccccacaagtttgggatctactacaatggctacaggcagtggcgcaccaatggcagacaataacgagggtgccgatggagtgggtaattcctcaggaaattggcattgcgattcccaatggtcgggcgacagagtcatcaccaccagcacccgaacctgggccctgcccacctacaacaaccacctctacaagcaaatctccagccaatcaggagccagcaacgacaaccactactttggctacagcaccccctgggggtattttgacttcaacagattccactgccacttttcaccacgtgactggcaaagactcatcaacaacaactggggattccgacccaagagactcaacttcaggctctttaacattcaagtcaaagaggtcacgcagaatgacggtacgacgacgattgccaataaccttaccagcacggttcaggtgtttactgactcggagtaccagctcccgtacgtcctcggctcggcgcatcaaggatgcctcccgccgtttccagcggacgtcttcatggtcccacagtatggatacctcaccctgaacaacgggagtcaggcggtaggacgctcttccttttactgcctggagtactttccttctcagatgcttcgtaccggagacaactttaccttcagttacacctttgaagacgttcctttccacagcagctacgctcacagtcaaagtctggaccggctgatgaatcctcttatcgaccagtacctgtattatctaaacaaaacacaatcaaatagtggaactcttcagcagtctcggctactgtttagtcaagctggacctaccagcatgtctcttcaagctaaaaactggctgcctggaccttgctacagacaacagcgtctgtcaaagcaggcaaacgacaacaacaacagcaactttccctggactgcggctacaaagtatcatctaaatggccgggactcgttggttaatccaggaccagctatggccagccacaaagacgatgaagaaaagtttttccccatgcatggaaccctgatatttggcaaacaaggaacaaatgctaacgacgcggatttggacaatgtcatgattacagatgaagaagaaatccgtaccaccaatcccgtggctacggagcagtacgggactgtgtcaaataatttgcaaaactcaaatactggtccaactactggaactgtcaatcaccaaggagcgttacctggtatggtgtggcaggatcgagacgtgtaccttcagggacccatttgggccaagattcctcacaccgatggacactttcacccttctccgctgatgggaggttttggactcaaacacccgcctcctcagatcatgatcaaaaacactcccgttccagccaatcctcccacaaacttcagttctgccaagtttgcttctttcatcacacagtattccacgggacaggttagcgtggagatcgagtgggagctgcagaaggagaacagcaaacgctggaaccccgagatccagtacacttccaactacaacaagtctgttaatgtggactttactgtggacactaatggtgtgtattcagagcctcgccccattggcaccagatacctgactcgtaatctgtaa

SEQ ID NO: 3676 - DNA, 2208 bp, Artificial Sequence
  source: /note="Description of Artificial Sequence: Synthetic polynucleotide"
atggctgccgatggttatcttccagattggctcgaggacactctctctgaaggaataagacagtggtggaagctcaaacctggcccaccaccgccaaagcccgcagagcggcataaggacgacagcaggggccttgtgcttcctgggtacaagtacctcggacccttcaacggactcgacaagggagagccggtcaacgaggcagacgccgcggccctcgagcacgacaaggcctacgaccggcagctcgacagcggagacaacccgtacctcaagtacaaccacgccgacgcggagtttcaggagcgccttaaagaagatacgtcttttgggggcaacctcggacgagcagtattccaggcgaaaaagagggttcttgaacctctgggcctggttgaggagcctgttaagacggctccgggaaaaaagaggccggtagagcactctcctgtggagccagactcctcctcgggaaccggaaaagcgggccagcagcctgcgagaaagggattgaattttggtcagactggagacgcagactccgtacctgacccccggcctctcggacagccaccagcagcccccgcaagtttgggatctactacaatggctacaggcagtggcgcaccaatggcagacaataacgagggtgccgatggagtgggtaattcctcaggaaattggcattgcgattcccaatggttgggcgacagagtcatcaccaccagcacccgaacctgggccctgcccacctacaacaaccacctctacaagcaaatctccagccaatcaggagccagcaacgacaaccactactttggctacagcaccccctgggggtattttgacttcaacagattccactgccacttttcaccacgtgactggcaaagactcatcaacaacaactggggattccgacccaagagactcaacttcaagctctttaacattcaagtcaaagaggtcacgcagaatgacggtacgacgacgattgccaataaccttaccagcacggttccggtgtttactgactcggagtaccagctcccgtacgtcctcggctcggcgcatcaaggatgcctcccgccgtttccagcggacgtcttcatggtcccacagtatggatacctcaccctgaacaacgggagtcaggcggtaggacgctcttccttttactgcctggagtactttccttctcagatgcttcgtaccggaaacaactttaccttcagttacacctttgaagacgttcctttccacagcagctacgctcacagtcaaagtctggaccggctgatgaatcctcttatcgaccagtacctgtattatctaaacaaaacacaatcaaatagtggaactcttcagcagtctcggctactgtttagtcaagctggacctaccagcatgtctctccaagctaaaaactggctgcctggaccttactacagacaacagcgtctgtcaaagcaggcaaacgacaacaacaacagcaactttccctggactgcggctacaaagtatcatccaaatggccgggactcgttggttgatccaggaccagctatggccagccacaaagacgatgaagaaaagtttttccccatgcatggaaccctgatatttggcaaacaagggacaaatgctaacgacgcggatttggacaatgtcatgattacagatgaagaagaaatccgtaccaccaatcccgtggctacggggcagtacgggactgtgtcaaataatttgcaaaactcaaatactggtccaactactggaactgtcaatcaccaaggagcgttacctggtatggtgtggcaggatcgagacgtgtaccttcagggacccatttgggccaagattcctcacaccgatggacactttcacccttctccgctgatgggaggttttggactcaaacacccgcctcctcagatcatggtcaaaaacactcccgttccagccaatcctcccacaaacttcagttctgccaagtttgcttctttcatcacacggtattccacgggacaggttagcgtggagatcgagtgggagctgcagaaggagaacagcaaacgctggaaccccgagatccagtacacttccaactacaacaagtctgttaatgtggactttactgtggacactaatggtgtgtattcagagcctcgccccattggcaccagatacctgactcgtaatctgtaa

SEQ ID NO: 3677 - DNA, 2208 bp, Artificial Sequence
  source: /note="Description of Artificial Sequence: Synthetic polynucleotide"
atggctgccgatggttatcttccagattggctcgaggacactctctctgaaggaataagacagtggtggaagctcaaacctggcccaccgccgccaaagcccgcagagcggcataaggacgacagcaggggtcttgtgcttcctgggtacaagtacctcggacccttcaacggactcgacaagggagagccggtcaacgaggcagacgccgcggccctcgagcacgacaaggcctacgaccggcagctcgacagcggagacaacccgtacctcaagtacaaccacgccgacgcggagtttcaggagcgccttaaagaagatacgtcttttgggggcaacctcggacgagcagtattccaggcgaaaaagagggttcttgaacctctgggcctggttgaggagcctgttaagacggttccgggaaaaaagaggccggtagagcactctcctgtggagccagactcctcctcgggaaccggaaaagcgggccagcagcctgcgagaaagagattgaattttggtcagactggagacgcagactccgtacctgacccccagcctctcggacagccaccagcagcccccacaagtttgggatctactacaatggctacaggcagtggcgcaccaatggcagacaataacgagggtgccgatggagtgggtaattcctcaggaaattggcattgcgattcccaatggtcgggcgacagagtcatcaccaccagcacccgaacctgggccctgcccacctacaacaaccacccctacaagcaaatctccagccaatcaggagccagcaacgacaaccactactttggctacagcaccccctgggggtattttgacttcaacagattccactgccacttttcaccacgtgactggcaaagactcatcaacaacaactggggattccgacccaagagactcaacttcaagctctttaacattcaagtcaaagaggtcacgcagaatgacggtacgacgacgattgccaataaccttaccagcacggttcaggtgtttactgactcggagtaccagctcccgtacgtcctcggctcggcgcatcaaggacgcctcccgccgtttccagcggacgtcttcatggtcccacagtatggatacctcaccctgaacaacgggagtcaggcggtaggacgctcttccttttactgcctggagtactttccttctcagatgcttcgtaccggaaacaactttaccttcagttacacctttgaagacgttcctttccacagcagctacgctcacagtcaaagtctggaccggctgatgaatcctcttatcgaccagtacctgtattatctaaacaaaacacaatcaaatagtggaactcttcagcagtctcggctactgtttagtcaagctggacctaccagcatgtctcttcaagctaaaaactggctgcctggaccttgctacagacaacagcgtctgtcaaagcaggcagacgacaacaacaacagcaactttccctggactgcggctacaaagtatcatctaaatggccgggactcgttggttaatccaggaccagctatggccagccacaaagacgatgaagaaaagtttttccccatgcatggaaccctgatatttggcaaacaaggaacaaatgctaacgacgcggatttggacaatgtcatgattacagatgaagaagaaatccgtaccaccaatcccgtggctacggagcagtacgggactgtgtcaaataatttgcaaaactcaaatactggtccaactactggaactgtcaatcaccaaggagcgttacctggtatggtgtggcaggatcgagacgtgtaccttcagggacccatttgggccaagattcctcacaccgatggacactttcacccttctccgctgatgggaggttttggactcaaacacccgcctcctcagatcatgatcaaaaacactcccgttccagccaatccccccacaaacttcagttctgccaagtttgcttctttcatcacacagtattccacgggacaggttagcgtggagatcgagtgggagctgcagaaggagaacagcaaacgctggaaccccgagatccagtacacttccaactacaacaagtctgttaatgtggactttactgtggacactaatggtgtgtattcagagcctcgccccattggcaccagatacctgactcgtaatctgtaa

SEQ ID NO: 3678 - DNA, 2208 bp, Artificial Sequence
  source: /note="Description of Artificial Sequence: Synthetic polynucleotide"
atggctgccgatggttatcttccagattggctcgaggacactctctctgaaggaataagacagtggtggaagctcaaacctggcccaccaccaccaaagcccgcagagcggcataaggacgacagcaggggtcttgtgcttcctgggtacaagtacctcggacccttcaacggactcgacaaaggagagccggtcaacgaggcagacgccgcggccctcgagcacgacaaggcctacgaccggcagctcgacagcggagacaacccgtacctcaagtacaaccacgccgacgcggagtttcaggagcgtcttaaagaagatacgtcttttgggggcaacctcggacgagcagtcttccaggcaaaaaagagggttcttgaacctctgggcctggttgaggaacctgttaagacggctccgggaaaaaagaggccggtagagcaatctcctgcggagccagactcctcctcgggaaccggaaaggcgggcaaccagcctgcaagaaagagattgaattttggtcagactggagacgcagactccgtacctgacccccagcctctcggacagccaccagcagccccctctggtctgggatctactacaatggctacaggcagtggcgcaccaatggcagacaataacgagggtgccgatggagtgggtaattcctcaggaaattggcattgcgattcccaatggttgggcgacagagtcatcaccaccagcacccgaacctgggccctgcccacctacaacaatcacctctacaagcaaatctccagccaatcaggagccagcaacgacaaccactactttggctacagcaccccctgggggtattttgacttcaacagattccactgccacttttcaccacgtgactggcaaagactcatcaacaacaactggggattccgacccaaaagactcaacttcaagctctttaacattcaagtcaaagaggtcacgcagaatgacggtacgacgacgattgccaataaccttaccagcacggttcaggtgtttactgactcggagtaccagctcccgtacgtcctcggctcggcgcatcaaggatgcctcccgccgtttccagcggacgtcttcatggtcccacagtatggatacctcaccctgaacaacgggagtcaggcggtaggacgctcttccttttactgcctggagtactttccttctcagatgcttcgtaccggaaacaactttaccttcagttacacctttgaagacgttcctttccacagcagctacgctcacagtcaaagtctggaccggctgatgaatcctctgatagaccagtacctgtattatctaaacaaaacacaatcaaatagtggaactcttcagcagtctcggctactgtttagtcaagctggacccaccagcatgtctcttcaagctaaaaactggctgcctggaccttgctacagacaacagcgtctgtcaaagcaggcaaacgacaacaacaacagcaactttccctggactgcggctacaaagtatcatctaaatggccgggactcgttggttaatccaggaccagctatggccagccacaaagacgatgaagaaaagtttttccccatgcatggaaccctgatatttggtaaacaaggaacaaatgctaacgacgcggatttggacaatgtcatgattacagatgaagaagaaatccgcaccaccaatcccgtggctacggagcagtacgggactgtgtcaaataatttgcaaaactcaaatactggtccaactactggaactgtcaatcaccaaggagcgttacctggtatggtgtggcaggatcgagacgtgtaccttcagggacccatttgggccaagattcctcacaccgatggacactttcatccttctccactgatgggaggttttggactcaaacacccgcctcctcagatcatgatcaaaaacactcccgttccagccaatcctcctacaaacttcagttctgccaagtttgcttctttcatcacacagtattccacggggcaggtcagcgtggagatagagtgggagctgcagaaggagaacagcaaacgctggaaccccgagatccagtatacttccaactacaacaagtctgttaatgtggactttactgtggacactaatggtgtgtattcagagcctcgccccattggcaccagatacctgactcgtaatctgtaa

SEQ ID NO: 3679 - DNA, 2205 bp, Artificial Sequence
  source: /note="Description of Artificial Sequence: Synthetic polynucleotide"
atggctgccgatggttatcttccagattggctcgaggacactctctctgaaggaataagacagtggtggaagctcaaacctggcccaccaccaaagcccgcagagcggcataaggacgacagcaggggtcttgtgcttcctgggtacaagtacctcggacccttcaacggactcgacaaaggagagccggtcaacgaggcagacgccgcggccctcgagcacgacaaggcctacgaccggcagctcgacagcggagacaacccgtacctcaagtacaaccacgccgacgcggagtttcaggagcgtcttaaagaagatacgtcttttgggggcaacctcggacgagcagtcttccaggcaaaaaagagggttcttgaacctctgggcctggttgaggaacctgttaagacggctccgggaaaaaagaggccggtagagcaatctcctgcggagccagactcctcctcgggaaccggaaaggcgggcaaccagcctgcaagaaagagattgaattttggtcagactggagacgcagactccgtacctgacccccagcctctcggacagccaccagcagccccctctggtctgggatctactacaatggctacaggcagtggcgcaccaatggcagacaataacgagggtgccgatggagtgggtaattcctcaggaaattggcattgcgattcccaatggttgggcgacagagtcatcaccaccagcacccgaacctgggccctgcccacctacaacaatcacctctacaagcaaatctccagccaatcaggagccagcaacgacaaccactactttggctacagcaccccctgggggtattttgacttcaacagattccactgccacttttcaccacgtgactggcaaagactcatcaacaacaactggggattccgacccaaaagactcaacttcaagctctttaacattcaagtcaaagaggtcacgcagaatgacggtacgacgacgattgccaataaccttaccagcacggttcaggtgtttactgactcggagtaccagctcccgtacgtcctcggctcggcgcatcaaggatgcctcccgccgtttccagcggacgtcttcatggtcccacagtatggatacctcaccctgaacaacgggagtcaggcggtaggacgctcttccttttactgcctggagtactttccttctcagatgcttcgtaccggaaacaactttaccttcagttacacctttgaagacgttcctttccacagcagctacgctcacagtcaaagtctggaccggctgatgaatcctctgatagaccagtacctgtattatctaaacaaaacacaatcaaatagtggaactcttcagcagtctcggctactgtttagtcaagctggacccaccagcatgtctcttcaagctaaaaactggctgcctggaccttgctacagacaacagcgtctgtcaaagcaggcaaacgacaacaacaacagcaactttccctggactgcggctacaaagtatcatctaaatggccgggactcgttggttaatccaggaccagctatggccagccacaaagacgatgaagaaaagtttttccccatgcatggaaccctgatatttggtaaacaaggaacaaatgctaacgacgcggatttggacaatgtcatgattacagatgaagaagaaatccgcaccaccaatcccgtggctacggagcagtacgggactgtgtcaaataatttgcaaaactcaaatactggtccaactactggaactgtcaatcaccaaggagcgttacctggtatggtgtggcaggatcgagacgtgtaccttcagggacccatttgggccaagattcctcacaccgatggacactttcatccttctccactgatgggaggttttggactcaaacacccgcctcctcagatcatgatcaaaaacactcccgttccagccaatcctcctacaaacttcagttctgccaagtttgcttctttcatcacacagtattccacggggcaggtcagcgtggagatagagtgggagctgcagaaggagaacagcaaacgctggaaccccgagatccagtatacttccaactacaacaagtctgttaatgtggactttactgtggacactaatggtgtgtattcagagcctcgccccattggcaccagatacctgactcgtaatctgtaa

SEQ ID NO: 3680 - DNA, 2208 bp, Artificial Sequence
  source: /note="Description of Artificial Sequence: Synthetic polynucleotide"
atggctgccgatggttatcttccagattggctcgaggacactctctctgaaggaataagacagtggtggaagctcaaacctggcccaccaccaccaaagcccgcagagcggcataaggacgacagcaggggtcttgtgcttcctgggtacaagtacctcggacccttcaacggactcgacaaaggagagccggtcaacgaggcagacgccgcggccctcgagcacgacaaggcctacgaccggcagctcgacagcggagacaacccgtacctcaagtacaaccacgccgacgcggagtttcaggagcgtcttaaagaagatacgtcttttgggggcaacctcggacgagcagtcttccaggcaaaaaagagggttcttgaacctctgggcctggttgaggaacctgttaagacggctccgggaaaaaagaggccggtagagcaatctcctgcggagccagactcctcctcgggaaccggaaaggcgggcaaccagcctgcaagaaagagattgaattttggtcagactggagacgcagactccgtacctgacccccagcctctcggacagccaccagcagccccctctggtctgggatctactacaatggctacaggcagtggcgcaccaatggcagacaataacgagggtgccgatggagtgggtaattcctcaggaaattggcattgcgattcccaatggttgggcgacagagtcatcaccaccagcacccgaacctgggccctgcccacctacaacaatcacctctacaagcaaatctccagccaatcaggagccagcaacgacaaccactactttggctacagcaccccctgggggtattttgacttcaacagattccaccgccacttttcaccacgtgactggcaaagactcatcaacaacaactggggattccgacccaaaagactcaacttcaagctctttaacattcaagtcaaagaggtcacgcagaatgacggtacgacgacgattgccaataaccttaccagcacggttcaggtgtttactgactcggagtaccagctcccgtacgtcctcggctcggcgcatcaaggatgcctcccgccgtttccagcggacgtcttcatggtcccacagtatggatacctcaccctgaacaacgggagtcaggcggtaggacgctcttccttttactgcctggagtactttccttctcagatgcttcgtaccggaaacaactttaccttcagttacacctttgaagacgttcctttccacagcagctacgctcacagtcaaagtctggaccggctgatgaatcctctgatagaccagtacctgtattatctaaacaaaacacaatcaaatagtggaactcttcagcagtctcggctactgtttagtcaagctggacccaccagcatgtctcttcaagctaaaaactggctgcctggaccttgctacagacaacagcgtctgtcaaagcaggcaaacgacaacaacaacagcaactttccctggactgcggctacaaagtatcatctaaatggccgggactcgttggttaatccaggaccagctatggccagccacaaagacgatgaagaaaagtttttccccatgcatggaaccctgatatttggtaaacaaggaacaaatgctaacgacgcggatttggacaatgtcatgattacagatgaagaagaaatccgcaccaccaatcccgtggctacggagcagtacgggactgtgtcaaataatttgcaaaactcaaatactggtccaactactggaactgtcaatcaccaaggagcgttacctggtatggtgtggcaggatcgagacgtgtaccttcagggacccatttgggccaagattcctcacaccgatggacactttcatccttctccactgatgggaggttttggactcaaacacccgcctcctcagatcatgatcaaaaacactcccgttccagccaatcctcctacaaacttcagttctgccaagtttgcttctttcatcacacagtattccacggggcaggtcagcgtggagatagagtgggagctgcagaaggagaacagcaaacgctggaaccccgagatccagtatacttccaactacaacaagtctgttaatgtggactttactgtggacactaatggtgtgtattcagagcctcgccccattggcaccagatacctgactcgtaatctgtaa

SEQ ID NO: 3681 - DNA, 2205 bp, Artificial Sequence
  source: /note="Description of Artificial Sequence: Synthetic polynucleotide"
atggctgccgatggttatcttccagattggctcgaggacactctctctgaaggaataagacagtggtggaagctcaaacctggcccaccaccaccaaagcccgcagagcggcataaggacgacagcaggggtcttgtgcttcctgggtacaagtacctcggacccttcaacggactcgacaaaggagagccggtcaacgaggcagacgccgcggccctcgagcacgacaaggcctacgaccggcagctcgacagcggagacaacccgtacctcaagtacaaccacgccgacgcggagtttcaggagcgtcttaaagaagatacgtcttttgggggcaacctcggacgagcagtcttccaggcaaaaaagagggttcttgaacctctgggcctggttgaggaacctgttaagacggctccgggaaaaaagaggccggtagagcaatctcctgcggagccagactcctcctcgggaaccggaaaggcgggcaaccagcctgcaagaaagagattgaattttggtcagactggagacgcagactccgtacctgacccccagcctctcggacagccaccagcagccccctctggtctgggatctactacaatggctacaggcagtggcgcaccaatggcagacaataacgagggtgccgatggagtgggtaattcctcaggaaattggcattgcgattcccaatggttgggcgacagagtcatcaccaccagcacccgaacctgggccctgcccacctacaacaatcacctctacaagcaaatctccagccaatcaggagccagcaacgacaaccactactttggctacagcaccccctgggggtattttgacttcaacagattccactgccacttttcaccacgtgactggcaaagactcatcaacaacaactggggattccgacccaaaagactcaacttcaagctctttaacattcaagtcaaagaggtcacgcagaatgacggtacgacgacgattgccaataaccttaccagcacggttcaggtgtttactgactcggagtaccagctcccgtacgtcctcggctcggcgcatcaaggatgcctcccgccgtttccagcggacgtcttcatggtcccacagtatggatacctcaccctgaacaacgggagtcaggcggtaggacgctcttccttttactgcctggagtactttccttctcagatgcttcgtaccggaaacaactttaccttcagttacacctttgaagacgttcctttccacagcagctacgctcacagtcaaagtctggaccggctgatgaatcctctgatagaccagtacctgtattatctaaacaaaacacaatcaaatagtggaactcttcagcagtctcggctactgtttagtcaagctggacccaccagcatgtctcttcaagctaaaaactggctgcctggaccttgctacagacaacagcgtctgtcaaagcaggcaaacgacaacaacagcaactttccctggactgcggctacaaagtatcatctaaatggccgggactcgttggttaatccaggaccagctatggccagccacaaagacgatgaagaaaagtttttccccatgcatggaaccctgatatttggtaaacaaggaacaaatgctaacgacgcggatttggacaatgtcatgattacagatgaagaagaaatccgcaccaccaatcccgtggctacggagcagtacgggactgtgtcaaataatttgcaaaactcaaatactggtccaactactggaactgtcaatcaccaaggagcgttacctggtatggtgtggcaggatcgagacgtgtaccttcagggacccatttgggccaagattcctcacaccgatggacactttcatccttctccactgatgggaggttttggactcaaacacccgcctcctcagatcatgatcaaaaacactcccgttccagccaatcctcctacaaacttcagttctgccaagtttgcttctttcatcacacagtattccacggggcaggtcagcgtggagatagagtgggagctgcagaaggagaacagcaaacgctggaaccccgagatccagtatacttccaactacaacaagtctgttaatgtggactttactgtggacactaatggtgtgtattcagagcctcgccccattggcaccagatacctgactcgtaatctgtaa

SEQ ID NO: 3682 - DNA, 2208 bp, Artificial Sequence
  source: /note="Description of Artificial Sequence: Synthetic polynucleotide"
atggctgccgatggttatcttccagattggctcgaggacactctctctgaaggaataagacagtggtggaagctcaaacctggcccaccaccaccaaggcccgcagagcggcatcaggacgacagcaggggtcttgtgcttcctgggtacaagtacctcggacccttcaacggactcgacaaaggagagccggtcaacgaggcagacgctgcggccctcgagcacgacaaggcctacgaccggcagctcgacagcggagacaacccgtacctcaagtacaaccacgccgacgcggagtttcaggagcgtcttaaagaagatacgtcttttgggggcaacctcggacgagcagtcttccaggcgaaaaagagggttcttgaacctctgggcctggttgaggaacctgttaagacggctccgggaaaaaagaggccggtagagcactctcctgcggagccagactcctcctcgggaaccggaaaagcgggccagcagcctgcaagaaagagattgaatttcggtcagactggagacgcagactccgtacctgacccccagcctctcgggcagccaccagcagcccccacaagtttgggatctactacaatggctacaggcagtggcgcaccaatggcagacaataacgagggtgccgatggagtgggtaattcctcaggaaattggcattgcgattcccaatggctgggcgacagagtcatcaccaccagcacccgaacctgggccctgcccacctacaacaaccacctctacaagcaaatctccagccaatcaggagcatcgaacgacaaccactactttggctacagcaccccttgggggtattttgacttcaacagattccactgtcacttctccccacgtgaccggcaaagactcatcaacaacaactggggattccgacccaagagactcaacttcaagctctttaacattcaagtcaaagaggtcacgcagaatgacggtacgacgacgattgccaataaccttaccagcacggttcaggtgtttactgactcggagtaccagctcccgtacgtcctcggctcggcgcatcaaggatgcctcccgccgtttccagcggacgtcttcatggtcccacagtatggatacctcaccctgaacaacgggagtcaggcggtaggacgctcttccttttactgcctggagtactttccttctcagatgctgcgtaccggaaacaactttaccttcagctacacctttgaggacgtgcccttccacagcagctacgctcacagccagagtttggaccggctgatgaatcctctgatcgaccagtatctgtattatctgaacaggacacaatcaaatagtggaactcttcagcagtctaggctactgtttagccaagctggacctaccagcatgtcccttcaagctaaaaactggctgcctggaccttgctacagacagcagcgtctgtcaaagcaggcaaacgacaacaacaacagcaactttccctggactgcggctacaaagtatcatctaaatggtcgggactcgttggttaatccaggaccagctatggccagccacaaagacgatgaagaaaagtttttccccatgcatggaaccctgatatttggtaaacaaggaacaaatgctaacgacgcggatttggaacatgtcatgattacagatgaagaagaaatcaggaccaccaatcccgtggctacagagcagtacggaaacgtgtcaaataatttgcaaaactcaaatactggtccaactacagaaaatgtcaatcaccagggagcgttacctggtatggtgtggcaggatcgagacgtgtacctgcagggacccatttgggccaagattcctcacaccgacggacactttcacccttctccactgatgggaggttttggactcaaacacccgcctcctcaaatcatgatcaaaaacactcctgttccagccaatcctcctacaaacttcagcgcggcaaagtttgcttccttcatcacacagtattccacgggacaggtcagcgtggagatcgagtgggagctgcagaaggagaacagcaaacgctggaaccccgagatccagtacacttccaactacaacaaatctgttaatgtggactttactgtggacgctaatggtgtgtattcagagcctcgccccattggcaccagatacctgactcgtaatctgtaa

SEQ ID NO: 3683 - DNA, 2208 bp, Artificial Sequence
  source: /note="Description of Artificial Sequence: Synthetic polynucleotide"
atggctgccgatggttatcttccagattggctcgaggacactctctctgaaggaataagacagtggtggaagctcaaacctggcccaccaccaccaaggcccgcagagcggcatcaggacgacagcaggggtcttgtgcttcctgggtacaagtacctcggacccttcaacggactcgacaaaggagagccggtcaacgaggcagacgctgcggccctcgagcacgacaaggcctacgaccggcagctcgacagcggagacaacccgtacctcaagtacaaccacgccgacgcggagtttcaggagcgtcttaaagaagatacgtcttttgggggcaacctcggacgagcagtcttccaggcgaaaaagagggttcttgaacctctgggcctggttgaggaacctgttaagacggctccgggaaaaaagaggccggtagagcactctcctgcggagccagactcctcctcgggaaccggaaaagcgggccagcagcctgcaagaaagagattgaatttcggtcagactggagacgcagactccgtacctgacccccagcctctcggacagccaccagcagcccccacaagtttgggatctactacaatggctacaggcagtggcgcaccaatggcagacaataacgagggtgccgatggagtgggtaattcctcaggaaattggcattgcgattcccaatggctgggcgacagagtcatcaccaccagcacccgaacctgggccctgcccacctacaacaaccacctctacaagcaaatctccagccaatcaggagcatcgaacgacaaccactactttggctacagcaccccttgggggtattttgacttcaacagattccactgtcacttctccccacgtgactggcaaagactcatcaacaacaactggggattccgacccaagagactcaacttcaagctctttaacattcaagtcaaagaggtcacgcagaatgacggtacgacgacgattgccaataaccttaccagcacggttcaggtgtttactgactcggagtaccagctcccgtacgtcctcggctcggcgcatcaaggatgcctcccgccgtttccagcggacgtcttcatggtcccacagtatggatacctcaccctgaacaacgggagtcaggcggtaggacgctcttccttttactgcctggagtactttccttctcagatgctgcgtaccggaaacaactttaccttcagctacacctttgaggacgtgcccttccacagcagctacgctcacagccagagtttggaccggctgatgaatcctctgatcgaccagtatctgtattatctgaacaggacacaatcaaatagtggaactcttcagcagtctaggctactgtttagccaagctggacccaccagcatgtcccttcaagctaaaaactggctgcctggaccttgctacagacagcagcgtctgtcaaagcaggcaaacgacaacaacaacagcaactttccctggactgcggctacaaagtatcgtctaaatggtcgggactcgttggttaatccaggaccagctatggccagccacaaagacgatgaagaaaagtttttccccatgcatggaaccctgatatttggtaaacaaggaacaaatgctaacgacgcggatttggaacatgtcatgattacagatgaagaagaaatcaggaccaccaatcccgtggctacagagcagtacggaaacgtgtcaaataatttgcaaaactcaaatactggtccaactacagaaaatgtcaatcaccagggagcgttacctggtatggtgtggcaggatcgagacgtgtacctgcagggacccatttgggccaagattcctcacaccgacggacactttcacccttctccactgatgggaggttttggactcaaacacccgcctcctcaaatcatgatcaaaaacactcctgttccagccaatcctcctacaaacttcagcgcggcaaagtttgcttccttcatcacacagtattccacgggacaggtcagcgtggagatcgagtgggagctgcagaaggagaacagcaaacgctggaaccccgagatccagtacacttccaactacaacaaatctgttaatgtggactttactgtggacgctaatggtgtgtattcagagcctcgccccattggcaccagatacctgactcgtaatctgtaa

SEQ ID NO: 3684 - DNA, 2208 bp, Artificial Sequence
  source: /note="Description of Artificial Sequence: Synthetic polynucleotide"
atggctgccgatggttatcttccagattggctcgaggacactctctctgaaggaataagacagtggtggaagctcaaacctggcccaccaccaccaaggcccgcagagcggcatcaggacgacagcaggggtcttgtgcttcctgggtacaagtacctcggacccttcaacggactcgacaaaggagagccggtcaacgaggcagacgctgcggccctcgagcacgacaaggcctacgaccggcagctcgacagcggagacaacccgtacctcaagtacaaccacgccgacgcggagtttcaggagcgtcttaaagaagatacgtcttttgggggcaacctcggacgagcagtcttccaggcgaaaaagagggttcttgaacctctgggcctggttgaggaacctgttaagacggctccgggaaaaaagaggccggtagagcactctcctgcggagccagactcctcctcgggaaccggaaaagcgggccagcagcctgcaagaaagagattgaatttcggtcagactggagacgcagactccgtacctgacccccagcctctcgggcagccaccagcagcccccacaagtttgggatctactacaatggctacaggcagtggcgcaccaatggcagacaataacgagggtgccgatggagtgggtaattcctcaggaaattggcattgcgattcccaatggctgggcgtcagagtcatcaccaccagcacccgaacctgggccctgcccacctacaacaaccacctctacaagcaaatctccagccaatcaggagcatcgaacgacaatcactactttggctacagcaccccttgggggtattttgacttcaacagattccactgtcacttctccccacgtgaccggcaaagactcatcaacaacaactggggattccgacccaagagactcaacttcaagctctttaacattcaagtcaaagaggtcacgcagaatgacggtacgacgacgattgccaataaccttaccagcacggttcaggtgtttactgactcggagtaccagctcccgtacgtcctcggctcggcgcatcaaggatgcctcccgccgtttccagcggacgtcttcatggtcccacagtatggatacctcaccctgaacaacgggagtcaggcggtaggacgctcttccttttactgcctggagtactttccttctcagatgctgcgtaccggaaacaactttaccttcagctacacctttgaggacgtgcccttccacagcagctacgctcacagccagagtttggaccggctgatgaatcctctgatcgaccagtatctgtattatctgaacaggacacaatcaaatagtggaactcttcagcagtctaggctactgtttagccaagctggacctaccagcatgtcccttcaagctaaaaactggctgcctggaccttgctacagacagcagcgtctgtcaaagcaggcaaacgacaacaacaacagcaactttccctggactgcggctacaaagtatcatctaaatggtcgggactcgttggttaatccaggaccagctatggccagccacaaagacgatgaagaaaagtttttccccatgcatggaaccctgatatttggtaaacaaggaacaaatgctaacgacgcggatttggaacatgtcatgattacagatgaagaagaaatcaggaccaccaatcccgtggctacagagcagtacggaaacgtgtcaaataatttgcaaaactcaaatactggtccaactacagaaaatgtcaatcaccagggagcgttacctggtatggtgtggcaggatcgagacgtgtacctgcagggacccatttgggccaagattcctcacaccgacggacactttcacccttctccactgatgggaggttttggactcaaacacccgcctcctcaaatcatgatcaaaaacactcctgttccagccaatcctcctacaaacttcagcgcggcaaagtttgcttccttcatcacacagtattccacgggacaggtcagcgtggagatcgagtgggagctgcagaaggagaacagcaaacgctggaaccccgagatccagtacacttccaactacaacaaatctgttaatgtggactttactgtggacgctaatggtgtgtattcagagcctcgccccattggcaccagatacctgactcgtaatctgtaa

SEQ ID NO: 3685 - DNA, 2208 bp, Artificial Sequence
  source: /note="Description of Artificial Sequence: Synthetic polynucleotide"
atggctgccgatggttatcttccagattggctcgaggacactctctctgaaggaataagacagtggtggaagctcaaacctggcccaccaccaccaaggcccgcagagcggcatcaggacgacagcaggggtcttgtgcttcctgggtacaagtacctcggacccttcaacggactcgacaaaggagagccggtcaacgaggcagacgctgcggccctcgagcacgacaaggcctacgaccggcagctcgacagcggagacaacccgtacctcaagtacaaccacgccgacgcggagtttcaggagcgtcttaaagaagatacgtcttttgggggcaacctcggacgagcagtcttccaggcgaaaaagagggttcttgaacctctgggcctggttgaggaacctgttaagacggctccgggaaaaaagaggccggtagagcactctcctgcggagccagactcctcctcgggaaccggaaaagcgggccagcagcctgcaagaaagagattgaatttcggtcagactggagacgcagactccgtacctgacccccagcctctcggacagccaccagcagcccccacaagtttgggatctactacaatggctataggcagtggcgcaccaatggcagacaataacgagggtgccgatggagtgggtaattcctcaggaaattggcattgcgattcccaatggctgggcgacagagtcatcaccaccagcacccgaacctgggccctgcccacctacaacaaccacctctacaagcaaatctccagccaatcaggagcatcgaacgacaaccactactttggctacagcaccccttgggggtattttgacttcaacagattccactgtcacttctccccacgtgactggcaaagactcatcaacaacaactggggattccgacccaagagactcaacttcaagctctttaacattcaagtcaaagaggtcacgcagaatgacggtacgacgacgattgccaataaccttaccagcacggttcaggtgtttactgactcggagtaccagctcccgtacgtcctcggctcggcgcatcaaggatgcctcccgccgtttccagcggacgtcttcatggtcccacagtatggatacctcaccctgaacaacgggagtcaggcggtaggacgctcttccttttactgcctggagtactttccttctcagatgctgcgtaccggaaacaactttaccttcagctacacctttgaggacgtgcccttccacagcagctacgctcacagccagagtttggaccggctgatgaatcctctgatcgaccagtatctgtattatctgaacaggacacaatcaaatagtggaactcttcagcagtctaggctactgtttagccaagctggacccaccagcatgtcccttcaagctaaaaactggctgcctggaccttgctacagacagcagcgtctgtcaaagcaggcaaacgacaacaacaacagcaactttccctggactgctgctacaaagtatcatctaaatggtcgggactcgttggttaatccaggaccagctatggccagccacaaagacgatgaagaaaagtttttccccatgcatggaaccctgatatttggtaaacaaggaacaaatgctaacgacgcggatttggaacatgtcatgattacagatgaagaagaaatcaggaccaccaatcccgtggctacagagcagtacggaaacgtgtcaaataatttgcaaaactcaaatactggtccaactacagaaaatgtcaatcaccagggagcgttacctggtatggtgtggcaggatcgagacgtgtacctgcagggacccatttgggccaagattcctcacaccgacggacactttcacccttctccactgatgggaggttttggactcaaacacccgcctcctcaaatcatgatcaaaaacactcctgttccagccaatcctcctacaaacttcagcgcggcaaagtttgcttccttcatcacacagtattccacgggacaggtcagcgtggagatcgagtgggagctgcagaaggagaacagcaaacgctggaaccccgagatccagtacacttccaactacaacaaatctgttaatgtggactttactgtggacgctaatggtgtgtattcagagcctcgccccattggcaccagatacctgactcgtaatctgtaa

SEQ ID NO: 3686 - DNA, 2208 bp, Artificial Sequence
  source: /note="Description of Artificial Sequence: Synthetic polynucleotide"
atggctgccgatggttatcttccagattggctcgaggacactctctctgaaggaataagacagtggtggaagctcaaacctggcccaccaccaccaaggcccgcagagcggcatcaggacgacagcaggggtcttgtgcttcctgggtacaagtacctcggacccttcaacggactcgacaaaggagagccggtcaacgaggcagacgctgcggccctcgagcacgacaaggcctacgaccggcagctcgacagcggagacaacccgtacctcaagtacaaccacgccgacgcggagtttcaggagcgtcttaaagaagatacgtcttttgggggcaacctcggacgagcagtcttccaggcgaaaaagagggttcttgaacctctgggcctggttgaggaacctgttaagacggctccgggaaaaaagaggccggtagagcactctcctgcggagccagactcctcctcgggaaccggaaaagcgggccagcagcctgcaagaaagagattgaatttcggtcagactggagacgcagactccgtacctgacccccagcctctcggacagccaccagcagcccccacaagtttgggatctactacaatggctacaggcagtggcgcaccaatggcagacaataacgagggtgccgatggagtgggtaattcctcaggaaattggcattgcgattcccaatggctgggcgacagagtcatcaccaccagcacccgaacctgggccctgcctacctacaacaaccacctctacaagcaaatctccagccaatcaggagcatcgaacgacaaccactactttggctacagcaccccttgggggtatcttgacttcaacagattccactgtcacttctccccacgtgactggcaaagactcatcaacaacaactggggattccgacccaagagactcaacttcaagctctttaacattcaagtcaaagaggtcacgcagaatgacggtacgacgacgattgccaacaaccttaccagcacggttcaggtgtttactgactcggagtaccagctcccgtacgtcctcggctcggcgcatcaaggatgcctcccgccgtttccagcggacgtcttcatggtcccacagtatggatacctcaccctgaacaacgggagtcaggcggtaggacgctcttccttttactgcctggagtactttccttctcagatgctgcgtaccggaaacaactttaccttcagctacacctttgaggacgtgcccttccacagcagctacgctcacagccagagtttggaccggctgatgaatcctctgatcgaccagtatctgtattatctgaacaggacacaatcaaatagtggaactcttcagcagtctaggctactgtttagccaagctggacccaccagcatgtcccttcaagctaaaaactggctgcctggaccttgctacagacagcagcgtctgtcaaagcaggcaaacgacaacaacaacagcaactttccctggactgcggctacaaagtatcatctaaatggtcgggactcgttggttaatccaggaccagctatggccagccacaaagacgatgaagaaaagtttttccccatgcatggaaccctgatatttggtaaacaaggaacaaatgctaacgacgcggatttggaacatgtcatgattacagatgaagaagaaatcaggaccaccaatcccgtggctacagagcagtacggaaacgtgtcaaataatttgcaaaactcaaatactggtccaactacagaaaatgtcaatcaccagggagcgttacctggtatggtgtggcaggatcgagacgtgtacctgcagggacccatttgggccaagattcctcacaccgacggacactttcacccttctccactgatgggaggttttggactcaaacacccgcctcctcaaatcatgatcaaaaacactcctgttccagccaatcctcctacaaacttcagcgcggcaaagtttgcttccttcatcacacagtattccacgggacaggtcagcgtggagatcgagtgggagctgcagaaggagaacagcaaacgctggaaccccgagatccagtacacttccaactacaacaaatctgttaatgtggactttactgtggacgctaatggtgtgtattcagagcctcgccccattggcaccagatacctgactcgtaatctgtaa

SEQ ID NO: 3687 - DNA, 2208 bp, Artificial Sequence
  source: /note="Description of Artificial Sequence: Synthetic polynucleotide"
atggctgccgatggttatcttccagattggctcgaggacactctctctgaaggaataagacagtggtggaagctcaaacctggcccaccaccgccaaagcccgcagagcggcataaggacgacagcaggggtcttgtgcttcctgggtacaagtacctcggacccttcaacggactcgacaagggagagccggtcaacgaggcagacgccgcggccctcgagcacgacaaggcctacgaccggcagctcgacagcggagacaacccgtacctcaagtacaaccacgccgacgcggagtttcaggagcgccttaaagaagatacgtcttttgggggcaacctcggacgagcagtattccaggcgaaaaagagggttcttgaacctctgggcctggttgaggagcctgttaagacggctccgggaaaaaagaggccggtagagcactctcctgtggagccagactcctcctcgggaaccggaaaagcgggccagcagcctgcgagaaagagattgaattttggtcagactggagacgcagactccgtacctgacccccagcctctcggacagccaccagcagcccccacaagtttgggatctactacaatggctacaggcagtggcgcaccaatggcagacaataacgagggtgccgatggagtgggtaattcctcaggaaattggcattgcgattcccaatggttgggcgacagagtcatcaccaccagcacccgaacctgggccctgcccacctacaacaaccacctctacaagcaaatctccagccaatcaggagcagcgaacgacaaccactactttggctacagcaccccctgggggtattttgacttcaacagattccactgccacttttcaccacgtgactggcaaagactcatcaacaacaactggggattccgacccaagagactcaacttcaagctctttaacattcaagtcaaagaggtcacgcagaatgacggtacgacgacgattgccaataaccttaccagcacggttcaggtgtttactgactcggagtaccagctcccgtacgtcctcggctcggcgcatcaaggatgcctcccgccgtttccagcggacgtcttcatggtcccacagtatggatacctcaccctgaacaacgggagtcaggcggtaggacgctcttccttttactgcctggagtactttccttctcagatgcttcgtaccggaaacaactttaccttcagttacacctttgaagacgttcctttccacagcagctacgctcacagtcaaagtctggaccggctgatgaatcctcttatcgaccagtacctgtattatctaaacaaaacacaatcaaatagtggaactcttcagcagtctcggctactgtttagtcaagctggacctaccagcatgtctcttcaagctaaaaactggctgcctggaccttgctacagacaacagcgtctgtcaaagcaggcaaacgacaacaacaacagcaactttccctggactgcggctacaaagtatcatctaaatggccgggactcgttggttaatccaggaccagctatggccagccacaaagacgatgaagaaaagtttttccccatgcatggaaccctgatatttggcaaacaaggaacaaatgctaacgacgcggatttggacaatgtcatgattacagatgaagaagaaatccgtaccaccaatcccgtggctacggagcagtacgggactgtgtcaaataatttgcaaaactcaaatactggtccaactactggaactgtcaatcaccaaggagcgttacctggtatggtgtggcaggatcgagacgtgtaccttcagggacccatttgggccaagattcctcacaccgatggacactttcacccttctccgctgatgggaggttttggactcaaacacccgcctcctcagatcatgatcaaaaacactcccgttccagccaatcctcccacaaacttcagttctgccaagtttgcttctttcatcacacagtattccacgggacaggttagcgtggagatcgagtgggagctgcagaaggagaacagcaaacgctggaaccccgagatccagtacacttccaactacaacaagtctgttaatgtggactttactgtggacactaatggtgtgtattcagagcctcgccccattggcaccagatacctgactcgtaatctgtaa

SEQ ID NO: 3688 - DNA, 2208 bp, Artificial Sequence
  source: /note="Description of Artificial Sequence: Synthetic polynucleotide"
atggctgccgatggttatcttccagattggctcgaggacactctctctgaaggaataagacagtggtggaagctcaaacctggcccaccaccaccaaggcccgcagagcggcatcaggacgacagcaggggtcttgtgcttcctgggtacaagtacctcggacccttcaacggactcgacaaaggagagccggtcaacgaggcagacgctgcggccctcgagcacgacaaggcctacgaccggcagctcgacagcggagacaacccgtacctcaagtacaaccacgccgacgcggagtttcaggagcgtcttaaagaagatacgtcttttgggggcaacctcggacgagcagtcttccaggcgaaaaagagggttcttgaacctctgggcctggttgaggaacctgttaagacggctccgggaaaaaagaggccggtagagcactctcctgcggagccagactcctcctcgggaaccggaaaagcgggccagcagcctgcaagaaagagattgaatttcggtcagactggagacgcagactccgtacctgacccccagcctctcggacagccaccagcagcccccacaagtttgggatctactacaatggctacaggcagtggcgcaccaatggcagacaataacgagggtgccgatggagtgggtaattcctcaggaaattggcattgcgattcccaatggctgggcgacagagtcatcaccaccagcacccgaacctgggccctgcccacctacaacaaccacctctacaagcaaatctccagccaatcaggagcatcgaacgacaaccactactttggctacagcaccccttgggggtattttgacttcaacagattccactgtcacttctccccacgtgactggcaaagactcatcaacaacaactggggattccgacccaagagactcaacttcaagctctttaacattcaagtcaaagaggtcacgcagaatgacggtacgacgacgattgccaataaccttaccagcacggttcaggtgtttactgactcggagtaccagctcccgtacgtcctcggctcggcgcatcaaggatgcctcccgccgtttccagcggacgtcttcatggtcccacagtatgggtacctcaccctgaacaacgggagtcaggcggtaggacgctcttccttttactgcctggagtactttccttctcagatgctgcgtaccggaaacaactttaccttcagctacacctttgaggacgtgcccttccacagcagctacgctcacagccagagtttggaccggctgatgaatcctctgatcgaccagtatctgtattatctgaacaggacacaatcaaatagtggaactcttcagcagtctaggctactgtttagccaagctggacccaccagcatgtcccttcaagctaaagactggctgcctggaccttgctacagacagcagcgtctgtcaaagcaggcaaacgacaacaacaacagcaactttccctggactgcggctacaaagtatcatctaaatggtcgggactcgttggttaatccaggaccagctatggccagccacaaagacgatgaagaaaagtttttccccatgcatggaaccctgatatttggtaaacaaggaacaaatgctaacgacgcggatttggaacatgtcatgattacagatgaagaagaaatcaggaccaccaatcccgtggctacagagcagtacggaaacgtgtcaaataatttgcaaaactcaaatactggtccaactacagaaaatgtcaatcaccagggagcgttacctggtatggtgtggcaggatcgagacgtgtacctgcagggacccatttgggccaagattcctcacaccgacggacactttcacccttctccaccgatgggaggttttggactcaaacacccgcctcctcaaatcatgatcaaaaacactcctgttccagccaatcctcctacaaacttcagcgcggcaaagtttgcttccttcatcacacagtattccacgggactggtcagcgtggagatcgagtgggagctgcagaaggagaacagcaaacgctggaaccccgagatccagtacacttccaactacaacaaatctgttaatgtggactttactgtggacgctaatggtgtgtattcagagcctcgccccattggcaccagatacctgactcgtaatctgtaa

SEQ ID NO: 3689 - DNA, 2208 bp, Artificial Sequence
  source: /note="Description of Artificial Sequence: Synthetic polynucleotide"
atggctgccgatggttatcttccagattggctcgaggacactctctctgaaggaataagacagtggtggaagctcaaacctggcccaccaccgccaaagcccgcagagcggcataaggacgacagcaggggtcttgtgcttcctgggtacaagtacctcggacccttcaacggactcgacaagggggagccggtcaacgaggcagacgccgcggccctcgagcacgacaaggcctacgaccggcagctcgacagcggagacaacccgtacctcaagtacaaccacgccgacgcggagtttcaggagcgtcttaaagaagatacgtcttttgggggcaacctcggacgagcagtcttccaggcgaaaaagagggttcttgaacctctgggcctggttgaggaacctgttaagacggctccgggaaaaaagaggccggtagagcactctcctgtggagccagactcctcctcgggaaccggaaaggcgggccagcagcctgcaagaaaaagattgaatttcggtcagactggagacgcagactccgtacctgacccccagcctctcggacagccaccagcagccccctctggtctgggaactaatacgatggctacaggcagtggcgcaccaatggcagacaataacgagggcgccgacggagtgggtaattcctcgggaaattggcattgcgattccacatggatgggcgacagagtcatcaccaccagcacccgcacctgggctctgcccacctacaacaaccatctgtacaagcaaatttccagccaatcaggagcatcgaacgacaaccactactttggctacagcaccccctgggggtattttgacttcaacagattccactgccacttttcgccacgtgactggcaaagactcatcaacaacaactggggattccggcccaagagactcagcttcaagctctttaacattcaagtcaaggaggtcacgcagaatgacggtacgacgacgattgccaataaccttaccagcacggttcaggtctttactgactcggagtaccagctcccgtacgtcctcggctcggcgcatcaaggatgcctcccgccgttcccagcagacgtcttcatggtgccacagtatggatacctcaccctgaacaacgggagtcaggcggtaggacgctcttcattttactgcctggagtacttcccttctcagatgcttcgcacgggaaacaactttaccttcagctacacctttgaggacgtgccttttcacagcagctacgctcacagccaaagtctggaccgtctcatgaatcctctcatcgaccaatacctgtattacttgagcaaaacaaacgctccaagcggaactcaccagatgtccaggcttcagttttctcaggccggagcgagtgacatgtcgggaccagctagaaactggcttcctggaccctgttaccgccagcagcgagtatcaaagcaggctgcggacaacaacaacagtgacttaccgtggactggagctaccaagtaccacctcaatggaagagactctctggtgaacccgggcccagctatggccagccacaaggatgatgaagaaaaatttttcctcatgagcggggttctcatcttcgggaaacaaggctcaaatgaaaacaatgtggacattgaaaaggttatgattacagacgaagaggaaatcaggaccaccaatcccgtggctacggagcagtatggttctgtatctaccaaccttcaaagcgcaaacacaagtccagctacctcagatgtcaatcaccaaggcgttcttcctggcatggtctggcaggacagagatgtgtacctgcaggggcccatctgggcaaagattcctcacacggacggacactttcacccttctcccctcatgggcggatttggattgaagcaccctcccccacagattctcatcaagaataccccggtacctgcgaatccttcgaccaccttcagtgcggcaaagtttgcttccttcatcacacagtattccacgggacaggtcagcgtggagatagagtgggagctgcagaaggagaacagcaaacgctggaaccccgagatccagtatacttccaactacaacaaatctgttaatgtggactttactgtggacactaatggtgtgtattcagagcctcgccccattggcaccagatacctgactcgtaatctgtaa

SEQ ID NO: 3690 - DNA, 2208 bp, Artificial Sequence
  source: /note="Description of Artificial Sequence: Synthetic polynucleotide"
atggctgccgatggttatcttccagattggctcgaggacactctctctgaaggaataagacagtggtggaagctcaaacctggcccaccaccaccaaggcccgcagagcggcatcaggacgacagcaggggtcttgtgcttcctgggtacaagtacctcggacccttcaacggactcgacaaaggagagccggtcaacgaggcagacgctgcggccctcgagcacgacaaggcctacgaccggcagctcgacagcggagacaacccgtacctcaagtacaaccacgccgacgcggagtttcaggagcgtcttaaagaagatacgtcttttgggggcaacctcggacgagcagtcttccaggcgaaaaagagggttcttgaacctctgggcctggttgaggaacctgttaagacggctccgggaaaaaagaggccggtagagcactctcctgcggagccagactcctcctcgggaaccggaaaagcgggccagcagcctgcaagaaagagattgaatttcggtcagactggagacgcagactccgtacctgacccccagcctctcggacagccaccagcagcccccacaagtttgggatctactacaatggctacaggcagtggcgcaccaatggcagacaataacgagggtgccgatggagtgggtaattcctcaggaaattggcattgcgattcccaatggctgggcgacagagtcatcaccaccagcacccgaacctgggccctgcccacctacaacaaccacctctacaagcaaatctccagccaatcaggagcatcgaacgacaaccactactttggctacagcaccccttgggggtattttgacttcaacagattccactgtcacttctccccacgtgactggcaaagactcatcaacaacaactggggattccgacccaagagactcaacttcaagctctttaacattcaagtcaaagaggtcacgcagaatgacggtacgacgacgattgccaataaccttaccagcacggttcaggtgtttactgactcggagtaccagctcccgtacgtcctcggctcggcgcatcaaggatgcctcccgccgtttccagcggacgtcttcatggtcccacagtatgggtacctcaccctgaacaacgggagtcaggcggtaggacgctcttccttttactgcctggagtactttccttctcagatgctgcgtaccggaaacaactttaccttcagctacacctttgaggacgtgtccttccacagcagctacgctcacagccagagtttggaccggctgatgaatcctctgatcgaccagtatctgtattatctgaacaggacacaatcaaatagtggaactcttcagcagtctaggctactgtttagccaagctggacccaccagcatgtcccttcaagctaaaaactggctgcctggaccttgctacagacagcagcgtctgtcaaagcaggcaaacgacaacaacaacagcaactttccctggactgcggctacaaagtatcatctaaatggtcgggactcgttggttaatccaggaccagctatggccagccacaaagacgatgaagaaaagtttttccccatgcatggaaccctgatatttggtaaacaaggaacaaatgctaacgacgcggatttggaacatgtcatgattacagatgaagaagaaatcaggaccaccaatcccgtggctacagagcagtacggaaacgtgtcaaataatttgcaaaactcaaatactggtccaactacagaaaatgtcaatcaccagggagcgttacctggtatggtgtggcaggatcgagacgtgtacctgcagggacccatttgggccaagattcctcacaccgacggacactttcacccttctccactgatgggaggttttggactcaaacacccgcctcctcaaatcatgatcaaaaacactcctgttccagccaatcctcctacaaacttcagcgcggcaaagtttgcttccttcatcacacagtattccacgggacaggtcagcgtggagatcgagtgggagctgcagaaggagaacagcaaacgctggaaccccgagatccagtacacttccaactacaacaaatctgttaatgtggactttactgtggacgctaatggtgtgtattcagagcctcgccccattggcaccagatacctgactcgtaatctgtaa

SEQ ID NO: 3691 - DNA, 2208 bp, Artificial Sequence
  source: /note="Description of Artificial Sequence: Synthetic polynucleotide"
atggctgccgatggttatcttccagattggctcgaggacactctctctgaaggaataagacagtggtggaagctcaaacctggcccaccaccaccaaggcccgcagagcggcatcaggacgacagcaggggtcttgtgcttcctgggtacaagtacctcggacccttcaacggactcgacaaaggagagccggtcaacgaggcagacgctgcggccctcgagcacgacaaggcctacgaccggcagctcgacagcggagacaacccgtacctcaagtacaaccacgccgacgcggagtttcaggagcgtcttaaagaagatacgtcttttgggggcaacctcggacgagcagtcttccaggcgaaaaagagggttcttgaacctctgggcctggttgaggaacctgttaagacggctccgggaaaaaagaggccggtagagcactctcctgcggagccagactcctcctcgggaaccggaaaagcgggccagcagcctgcaagaaagagattgaatttcggtcagactggagacgcagactccgtacctgacccccagcctctcggacagccaccagcagcccccacaagtttgggatctactacaatggctacaggcagtggcgcaccaatggcagacaataacgagggtgccgatggagtgggtaattcctcaggaaattggcattgcgattcccaatggctgggcgacagagtcatcaccaccagcacccgaacctgggccctgcccacctacaacaaccacctctacaagcaaatctccagccaatcaggagcatcgaacgacaaccactactttggctacagcaccccttgggggtattttgacttcaacagattccactgtcacttctccccacgtgactggcaaagactcatcaacaacaactggggattccgacccaagagactcaacttcaagctctttaacattcaagtcaaagaggtcacgcagaatgacggtacgacgacgattgccaataaccttaccagcacggttcaggtgtttactgactcggagtaccagctcccgtacgtcctcggctcggcgcatcaaggatgcctcccgccgtttccagcggacgtcttcatggtcccacagtatggatacctcaccctgaacaacgggagtcaggcggtaggacgctcttccttttactgcctggagtactttccttctcagatgctgcgtaccggaaacaactttaccttcagctacacctttgaggacgtgcccttccacagcagctacgctcacagccagagtttggaccggctgatgaatcctctgatcgaccagtatctgtattatctgaacaggacacaatcaaatagtggaactcttcagcagtctaggctactgtttagccaagctggacccaccagcatgtcccttcaagctaaaaactggctgcctggaccttgctacagacagcagcgtctgtcaaagcaggcaaacgacaacaacaacagcaactttccctggactgcggctacaaagtatcatctaaatggtcgggactcgttggttaatccaggaccagctatggccagccacaaagacgatgaagaaaagtttttccccatgcatggaaccctgatatttggtaaacaaggaacaaatgctaacgacgcggatttggaacatgtcatgattacagatgaagaagaaatcaggaccaccaatcccgtggctacagagcagtacggaaacgtgtcaaataatttgcaaaactcaaatactggcccaactacagaaaatgtcaatcaccagggagcgttacttggtatggtgtggcaggatcgagacgtgtacctgcagggacccatttgggccaagattcctcacaccgacggacactttcacccttctccactgatgggaggttttggactcaaacacccgcctcctcaaatcatgatcaaaaacactcctgttccagccaatcctcctacaaacttcagcgcggcaaagtttgcttccttcatcacacagtattccacgggacaggtcagcgtggagatcgagtgggagctgcagaaggagaacagcaaacgctggaaccccgagatccagtacacttccaactacaacaaatctgttaatgtggactttactgtggacgctaatggtgtgtattcagagcctcgccccattggcaccagatacctgactcgtaatctgtaa

SEQ ID NO: 3692 - DNA, 2208 bp, Artificial Sequence
  source: /note="Description of Artificial Sequence: Synthetic polynucleotide"
atggctgccgatggttatcttccagattggctcgaggacactctctctgaaggaataagacagtggtggaagctcaaacctggcccaccaccaccaaggcccgcagagcggcatcaggacgacagcaggggtcttgtgcttcctgggtacaagtacctcggacccttcaacggactcgacaaaggagagccggtcaacgaggcagacgctgcggccctcgagcacgacaaggcctacgaccggcagctcgacagcggagacaacccgtacctcaagtacaaccacgccgacgcggagtttcaggagcgtcttaaagaagatacgtcttttgggggcaacctcggacgagcagtcttccaggcgaaaaagagggttcttgaacctctgggcctggttgaggaacctgttaagacggctccgggaaaaaagaggccggtagagcactctcctgcggagccagactcctcctcgggaaccggaaaagcgggccagcagcctgcaagaaagagattgaatttcggtcagactggagacgcagactccgtacctgacccccagcctctcggacagccaccagcagcccccacaagtttgggatctactacaatggctacaggcagtggcgcaccaatggcagacaataacgagggtgccgatggagtgggtaattcctcaggaaattggcattgcgattcccaatggctgggcgacagagtcatcaccaccagcacccgaacctgggccctgcccacctacaacaaccacctctacaagcaaatctccagccaatcaggagcatcgaacgacaaccactactttggctacagcaccccttgggggtattttgacttcaacagattccactgtcacttctccccacgtgactggcaaagactcatcaacaacaactggggattccgacccaagagactcaacttcaagctctttaacattcaagtcaaagaggtcacgcagaatgacggtacggcgacgattgccaataaccttaccagcacggttcaggtgtttactgactcggagtaccagctcccgtacgtcctcggctcggcgcatcaaggatgcctcccgccgtttccagcggacgtcttcatggtcccacagtatggatacctcaccctgaacaacgggagtcaggcggtaggacgctcttccttttactgcctggagtactttccttctcagatgctgcgtaccggaaacaactttaccttcagctacacctttgaggacgtgcccttccacagcagctacgctcacagccagagtttggaccggctgatgaatcctctgatcgaccagtatctgtattatctgaacaggacacaatcaaatagtggaactcttcagcagtctaggctactgtttagccaagctggacccaccagcatgtcccttcaagctaaaaactggctgcctggaccttgctacagacagcagcgtctgtcaaagcaggcaaacgacaacaacaacagcaactttccctggactgcggctacaaagtatcatctaaatggtcgggactcgttggttaatccaggaccagctatggccagccacaaagacgatgaagaaaagtttttccccatgcatggaaccctgatatttggtaaacaaggaacaaatgctaacgacgcggatttggaacatgtcatgattacagatgaagaagaaatcaggaccaccaatcccgtggctacagagcagtacggaaacgtgtcaaataatttgcaaaactcaaatactggtccaactacagaaaatgtcaatcaccagggagcgttacctggtatggtgtggcaggatcgagacgtgtacctgcagggacccatttgggccaagattcctcacaccgacggacactttcacccttctccactgatgggaggttttggactcaaacacccgcctcctcaaatcatgatcaaaaacactcctgttccagccaatcctcctacaaacttcagcgcggcaaagtttgcttccttcatcacacagtattccacgggacaggtcagcgtggagatcgagtgggagctgcagaaggagaacagcaaacgctggaaccccgagatccagtacacttccaactacaacaaatctgttaatgtggactttactgtggacgctaatggtgtgtattcagagcctcgccccattggcaccagatacctgactcgtaatctgtaa

SEQ ID NO: 3693 - DNA, 2208 bp, Artificial Sequence
  source: /note="Description of Artificial Sequence: Synthetic polynucleotide"
atggctgccgatggttatcttccagattggctcgaggacactctctctgaaggaataagacagtggtggaagctcaaacctggcccaccaccgccaaagcccgcagagcggcataaggacgacagcaggggtcttgtgcttcctgggtacaagtacctcggacccttcaacggactcgacaagggagagccggtcaacgaggcagacgccgcggccctcgagcacgacaaggcctacgaccggcagctcgacagcggagacaacccgtacctcaagtacaaccacgccgacgcggagtttcaggagcgccttaaagaagatacgtcttttgggggcaacctcggacgagcagtattccaggcgaaaaagagggttcttgaacctctgggcctggttgaggagcctgttaagacggctccgggaaaaaagaggccggtagagcactctcctgtggagccagactcctcctcgggaaccggaaaagcgggccagcagcctgcgagaaagagattgaattttggtcagactggagacgcagactccgtacctgacccccagcctctcggacagccaccagcagcccccacaagtttgggatctactacaatggctacaggcagtggcgcaccaatggcagacaataacgagggtgccgatggagtgggtaattcctcaggaaattggcattgcgattcccaatggttgggcgacagagtcatcaccaccagcacccgaacctgggccctgcccacctacaacaaccacctctacaagcaaatctccagccaatcaggagccagcaacgacaaccactactttggctacagcaccccctgggggtattttgacttcaacagattccactgccacttttcaccacgtgactggcaaagactcatcaacaacaactggggattccgacccaagagactcaacttcaagctctttaacattcaagtcaaagaggtcacgcagaatgacggtacgacgacgattgccaataaccttaccagcacggttcaggtgtttactgactcggagtaccagctcccgtacgtcctcggctcggcgcatcaaggatgcctcccgccgtttccagcggacgtcttcatggtcccacagtatggatacctcaccctgaacaacgggagtcaggcggtaggacgctcttccttttactgcctggagtactttccttctcagatgcttcgtaccggaaacaactttaccttcagttacacctttgaagacgttcctttccacagcagctacgctcacagtcaaagtctggaccggctgatgaatcctcttatcgaccagtacctgtattatctaaacaaaacacaatcaaatagtggaactcttcagcagtctcggctactgtttagtcaagctggacctaccagcatgtctcttcaagctaaaaactggctgcctggaccttgctacagacaacagcgtctgtcaaagcaggcaaacgacaacaacaacagcaactttccctggactgcggctacaaagtatcatctaaatggccgggactcgttggttaatccaggaccagctatggccagccacaaagacgatgaagaaaagtttttccccatgcatggaaccctgatatttggcaaacaaggaacaaatgctaacgacgcggatttggacaatgtcatgattacagatgaagaagaaatccgtaccaccaatcccgtggctacggagcagtacgggactgtgtcaaataatttgcaaaactcaaatactggtccaactactggaactgtcaatcaccaaggagcgttacctggtatggtgtggcaggatcgagacgtgtaccttcagggacccatttgggccaagattcctcacaccgatggacactttcacccttctccgctgatgggaggttttggactcaaacacccgcctcctcagatcatgatcaaaaacactcccgttccagccaatcctcccacaaacttcagttctgccaagtttgcttctttcatcacacagtattccacgggacaggttagcgtggagatcgagtgggagctgcagaaggagaacagcaaacgctggaaccccgagatccagtacacttccaactacaacaagtctgttaatgtggactttactgtggacactaatggtgtgtattcagagcctcgccccattggcaccagatacctgactcgtaatctgtaa

SEQ ID NO: 3694 - DNA, 2208 bp, Artificial Sequence
  source: /note="Description of Artificial Sequence: Synthetic polynucleotide"
atggctgccgatggttatcttccagattggctcgaggacactctctctgaaggaataagacagtggtggaagctcaaacctggcccaccaccgccaaagcccgcagagcggcataaggacgacagcaggggtcttgtgcttcctgggtacaagtacctcggacccttcaacggactcgacaagggagagccggtcaacgaggcagacgccgcggccctcgagcacgacaaggcctacgaccggcagctcgacagcggagacaacccgtacctcaagtacaaccacgccgacgcggagtttcaggagcgccttaaagaagatacgtcttttgggggcaacctcggacgagcagtattccaggcgaaaaagagggttcttgaacctctgggcctggttgaggagcctgttaagacggctccgggaaaaaagaggccggtagagcactctcctgtggagccagactcctcctcgggaaccggaaaagcgggccagcagcctgcgagaaagagattgaattttggtcagactggagacgcagactccgtacctgacccccagcctctcggacagccaccagcagcccccacaagtttgggatctactacaatggctacaggcagtggcgcaccaatggcagacaataacgagggtgccgatggagtgggtaattcctcaggaaattggcattgcgattcccaatggttgggcgacagagtcatcaccaccagcacccgaacctgggccctgcccacctacaacaaccacctctacaagcaaatctccagccaatcaggagccagcaacgacaaccactactttggctacagcaccccctgggggtattttgacttcaacagattccactgccacttttcaccacgtgactggcaaagactcatcaacaacaactggggattccgacccaagagactcaacttcaagctctttaacattcaagtcaaagaggtcacgcagaatgacggtacgacgacgattgccaataaccttaccagcacggttcaggtgtttactgactcggagtaccagctcccgtacgtcctcggctcggcgcatcaaggatgcctcccgccgtttccagcggacgtcttcatggtcccacagtatggatacctcaccctgaacaacgggagtcaggcggtaggacgctcttccttttactgcctggagtactttccttctcagatgcttcgtaccggaaacaactttaccttcagttacacctttgaagacgttcctttccacagcagctacgctcacagtcaaagtctggaccggctgatgaatcctcttatcgaccagtacctgtattatctaaacaaaacacaatcaaatagtggaactcttcagcagtctcggctactgtttagtcaagctggacctaccagcatgtctcttcaagctaaaaactggctgcctggaccttgctacagacaacagcgtctgtcaaagcaggcaaacgacaacaacaacagcaactttccctgggctgcggctacaaagtatcatctaaatggccgggactcgttggttaatccaggaccagctatggccagccacaaagacgatgaagaaaagtttttccccatgcatggaaccctgatatttggcaaacaaggaacaaatgctaacgacgcggatttggacaatgtcatgattacagatgaagaagaaatccgtaccaccaatcccgtggctacggagcagtacgggactgtgtcaaataatttgcaaaactcaaatactggtccaactactggaactgtcaatcaccaaggagcgttacctggtatggtgtggcaggatcgagacgtgtaccttcagggacccatttgggccaagattcctcacaccgatggacactttcacccttctccgctgatgggaggttttggactcaaacacccgcctcctcagatcatgatcaaaaacactcccgttccagccaatcctcccacaaacttcagttctgccaagtttgcttctttcatcacacagtattccacgggacaggttagcgtggagatcgagtgggagctgcagaaggagaacagcaaacgctggaaccccgagatccagtacacttccaactacaacaagtctgttaatgtggactttactgtggacactaatggtgtgtattcagagcctcgccccattggcaccagatacctgactcgtaatctgtaa

SEQ ID NO: 3695 - DNA, 2208 bp, Artificial Sequence
  source: /note="Description of Artificial Sequence: Synthetic polynucleotide"
atggctgccgatggttatcttccagattggctcgaggacactctctctgaaggaataagacagtggtggaagctcaaacctggcccaccaccgccaaagcccgcagagcggcataaggacgacagcaggggtcttgtgcttcctgggtacaagtacctcggacccttcaacggactcgacaagggagagccggtcaacgaggcagacgccgcggccctcgagcacgacaaggcctacgaccggcagctcgacagcggagacaacccgtacctcaagtacaaccacgccgacgcggagtttcaggagcgccttaaagaagatacgtcttttgggggcaacctcggacgagcagtattccaggcgaaaaagagggttcttgaacctctgggcctggttgaggagcctgttaagacggctccgggaaaaaagaggccggtagagcactctcctgtggagccagactcctcctcgggaaccggaaaagcgggccagcagcctgcgagaaagagattgaattttggtcagactggagacgcagactccgtacctgacccccagcctctcggacagccaccagcagcccccacaagtttgggatctactacaatggctacaggcagtggcgcaccaatggcagacaataacgagggtgccgatggagtgggtaattcctcaggaaattggcattgcgattcccaatggttgggcgacagagtcatcaccaccagcacccgaacctgggccctgcccacctacaacaaccacctctacaagcaaatctccagccaatcaggagccagcaacgacaaccactactttggctacagcaccccctgggggtattttgacttcaacagattccactgccacttttcaccacgtgactggcaaagactcatcaacaacaactggggattccgacccaagagactcaacttcaagctctttaacattcaagtcaaagaggtcacgcagaatgacggtacgacgacgattgccaataaccttaccagcacggttcaggtgtttactgactcggagtaccagctcccgtacgtcctcggctcggcgcatcaaggatgcctcccgccgtttccagcggacgtcttcatggtcccacagtatggatacctcaccctgaacaacgggagtcaggcggtaggacgctcttccttttactgcctggagtactttccttctcagatgcttcgtaccggaaacaactttaccctcagttacacctttgaagacgttcctttccacagcagctacgctcacagtcaaagtctggaccggctgatgaatcctcttatcgaccagtacctgtattatctaaacaaaacacaatcaaatagtggaactcttcagcagtctcggctactgtttagtcaagctggacctaccagcatgtctcttcaagctaaaaactggctgcctggaccttgctacagacaacagcgtctgtcaaagcaggcaaacgacaacaacaacagcaactttccctggactgcggctacaaagtatcatctaaatggccgggactcgttggttaatccaggaccagctatggccagccacaaagacgatgaagaaaagtttttccccatgcatggaaccctgatatttggcaaacaaggaacaaatgctaacgacgcggatttggacaatgtcatgattacagatgaagaagaaatccgtaccaccaatcccgtggctacggagcagtacgggactgtgtcaaataatttgcaaaactcaaatactggtccaactactggaactgtcaatcaccaaggagcgttacctggtatggtgtggcaggatcgagacgtgtaccttcagggacccatttgggccaagattcctcacaccgatggacactttcacccttctccgctgatgggaggttttggactcaaacacccgcctcctcagatcatgatcaaaaacactcccgttccagccaatcctcccacaaacttcagttctgccaagtttgcttctttcatcacacagtattccacgggacaggttagcgtggagatcgagtgggagctgcagaaggagaacagcaaacgctggaaccccgagatccagtacacttccaactacaacaagtctgttaatgtggactttactgtggacactaatggtgtgtattcagagcctcgccccattggcaccagatacctgactcgtaatctgtaa

SEQ ID NO: 3696 - DNA, 2208 bp, Artificial Sequence
  source: /note="Description of Artificial Sequence: Synthetic polynucleotide"
atggctgccgatggttatcttccagattggctcgaggacactctctctgaaggaataagacagtggtggaagctcaaacctggcccaccaccgccaaagcccgcagagcggcataaggacgacagcaggggtcttgtgcttcctgggtacaagtacctcggacccttcaacggactcgacaagggagagccggtcaacgaggcagacgccgcggccctcgagcacgacaaggcctacgaccggcagctcgacagcggagacaacccgtacctcaagtacaaccacgccgacgcggagtttcaggagcgccttaaagaagatacgtcttttgggggcaacctcggacgagcagtattccaggcgaaaaggagggttcttgaacctctgggcctggttgaggagcctgttaagacggctccgggaaaaaagaggccggtagagcactctcctgtggagccagactcctcctcgggaaccggaaaagcgggccagcagcctgcgagaaagagattgaattttggtcagactggagacgcagactccgtacctgacccccagcctctcggacagccaccagcagcccccacaagtttgggatctactacaatggctacaggcagtggcgcaccaatggcagacaataacgagggtgccgatggagtgggtaattcctcaggaaattggcattgcgattcccaatggttgggcgacagagtcatcaccaccagcacccgaacctgggccctgcccacctacaacaaccacctctacaagcaaatctccagccaatcaggagccagcaacgacaaccactactttggctacagcaccccctgggggtattttgacttcaacagattccactgccacttttcaccacgtgactggcaaagactcatcaacaacaactggggattccgacccaagagactcaacttcaagctctttaacattcaagtcaaagaggtcacgcagaatgacggtacgacgacgattgccaataaccttaccagcacggttcaggtgtttactgactcggagtaccagctcccgtacgtcctcggctcggcgcatcaaggatgcctcccgccgtttccagcggacgtcttcatggtcccacagtatggatacctcaccctgaacaacgggagtcaggcggtaggacgctcttccttttactgcctggagtactttccttctcagatgcttcgtaccggaaacaactttaccttcagttacacctttgaagacgttcctttccacagcagctacgctcacagtcaaagtctggaccggctgatgaatcctcttatcgaccagtacctgtattatctaaacaaaacacaatcaaatagtggaactcttcagcagtctcggctactgtttagtcaagctggacctaccagcatgtctcttcaagctaaaaactggctgcctggaccttgctacagacaacagcgtctgtcaaagcaggcaaacgacaacaacaacagcaactttccctggactgcggctacaaagtatcatctaaatggccgggactcgttggttaatccaggaccagctatggccagccacaaagacgatgaagaaaagtttttccccatgcatggaaccctgatatttggcaaacaaggaacaaatgctaacgacgcggatttggacaatgtcatgattacagatgaagaagaaatccgtaccaccaatcccgtggctacggagcagtacgggactgtgtcaaataatttgcaaaactcaaatactggtccaactactggaactgtcaatcaccaaggagcgttacctggtatggtgtggcaggatcgagacgtgtaccttcagggacccatttgggccaagattcctcacaccgatggacactttcacccttctccgctgatgggaggttttggactcaaacacccgcctcctcagatcatgatcaaaaacactcccgttccagccaatcctcccacaaacttcagttctgccaagtttgcttctttcatcacacagtattccacgggacaggttagcgtggagatcgagtgggagctgcagaaggagaacagcaaacgctggaaccccgagatccagtacacttccaactacaacaagtctgttaatgtggactttactgtggacactaatggtgtgtattcagagcctcgccccattggcaccagatacctgactcgtaatctgtaa

SEQ ID NO: 3697 - DNA, 2208 bp, Artificial Sequence
  source: /note="Description of Artificial Sequence: Synthetic polynucleotide"
atggctgccgatggttatcttccagattggctcgaggacactctctctgaaggaataagacagtggtggaagctcaaacctggcccaccaccgccaaagcccgcagagcggcataaggacgacagcaggggtcttgtgcttcctgggtacaagtacctcggacccttcaacggactcgacaagggagagccggtcaacgaggcagacgccgcggccctcgagcacgacaaggcctacgaccggcagctcgacagcggagacaacccgtacctcaagtacaaccacgccgacgcggagtttcaggagcgccttaaagaagatacgtcttttgggggcaacctcggacgagcagtattccaggcgaaaaagagggttcttgaacctctgggcctggttgaggagcctgttaagacggctccgggaaaaaagaggccggtagagcactctcctgtggagccagactcctcctcgggaaccggaaaagcgggccagcagcctgcgagaaagagattgaattttggtcagactggagacgcagactccgtacctgacccccagcctctcggacagccaccagcagcccccacaagtttgggatctactacaatggctacaggcagtggcgcaccaatggcagacaataacgagggtgccgatggagtgggtaattcctcaggaaattggcattgcgattcccaatggttgggcggcagagtcatcaccaccagcacccgaacctgggccctgcccacctacaacaaccacctctacaagcaaatctccagccaatcaggagccagcaacgacaaccactactttggctacagcaccccctgggggtattttgacttcaacagattccactgccacttttcaccacgtgactggcaaagactcatcaacaacaactggggattccgacccaagagactcaacttcaagctctttaacattcaagtcaaagaggtcacgcagaatgacggtacgacgacgattgccaataaccttaccagcacggttcaggtgtttactgactcggagtaccagctcccgtacgtcctcggctcggcgcatcaaggatgcctcccgccgtttccagcggacgtcttcatggtcccacagtatggatacctcaccctgaacaacgggagtcaggcggtaggacgctcttccttttactgcctggagtactttccttctcagatgcttcgtaccggaaacaactttaccttcagttacacctttgaagacgttcctttccacagcagctacgctcacagtcaaagtctggaccggctgatgaatcctcttatcgaccagtacctgtattatctaaacaaaacacaatcaaatagtggaactcttcagcagtctcggctactgtttagtcaagctggacctaccagcatgtctcttcaagctaaaaactggctgcctggaccttgctacagacaacagcgtctgtcaaagcaggcaaacgacaacaacaacagcaactttccctggactgcggctacaaagtatcatctaaatggccgggactcgttggttaatccaggaccagctatggccagccacaaagacgatgaagaaaagtttttccccatgcatggaaccctgatatttggcaaacaaggaacaaatgctaacgacgcggatttggacaatgtcatgattacagatgaagaagaaatccgtaccaccaatcccgtggctacggagcagtacgggactgtgtcaaataatttgcaaaactcaaatactggtccaactactggaactgtcaatcaccaaggagcgttacctggtatggtgtggcaggatcgagacgtgtaccttcagggacccatttgggccaagattcctcacaccgatggacactttcacccttctccgctgatgggaggttttggactcaaacacccgcctcctcagatcatgatcaaaaacactcccgttccagccaatcctcccacaaacttcagttctgccaagtttgcttctttcatcacacagtattccacgggacaggttagcgtggagatcgagtgggagctgcagaaggagaacagcaaacgctggaaccccgagatccagtacacttccaactacaacaagtctgttaatgtggactttactgtggacactaatggtgtgtattcagagcctcgccccattggcaccagatacctgactcgtaatctgtaa

SEQ ID NO: 3698 - DNA, 2205 bp, Artificial Sequence
  source: /note="Description of Artificial Sequence: Synthetic polynucleotide"
atggctgccgatggttatcttccagattggctcgaggacactctctctgaaggaataagacagtggtggaagctcaaacctggcccaccaccgccaaagcccgcagagcggcataaggacgacagcaggggtcttgtgcttcctgggtacaagtacctcggacccttcaacggactcgacaagggagagccggtcaacgaggcagacgccgcggccctcgagcacgacaaggcctacgaccggcagctcgacagcggagacaacccgtacctcaagtacaaccacgccgacgcggagtttcaggagcgccttaaagaagatacgtcttttgggggcaacctcggacgagcagtattccaggcgaaaaagagggttcttgaacctctgggcctggttgaggagcctgttaagacggctccgggaaaaaagaggccggtagagcactctcctgtggagccagactcctcctcgggaaccggaaaagcgggccagcagcctgcgagaaagagattgaattttggtcagactggagacgcagactccgtacctgacccccagcctctcggacagccaccagcagcccccacaagtttgggatctactacaatggctacaggcagtggcgcaccaatggcagacaataacgagggtgccgatggagtgggtaattcctcaggaaattggcattgcgattcccaatggttgggcgacagagtcatcaccaccagcacccgaacctgggccctgcccacctacaacaaccacctctacaagcaaatctccagccaatcaggagccagcaacgacaaccactactttggctacagcaccccctgggggtattttgacttcaacagattccactgccacttttcaccacgtgactggcaaagactcatcaacaacaactggggattccgacccaagagactcaacttcaagctctttaacattcaagtcaaagaggtcacgcagaatgacggtacgacgacgattgccaataaccttaccagcacggttcaggtgtttactgactcggagtaccagctcccgtacgtcctcggctcggcgcatcaaggatgcctcccgccgtttccagcggacgtcttcatggtcccacagtatggatacctcaccctgaacaacgggagtcaggcggtaggacgctcttccttttactgcctggagtactttccttctcagatgcttcgtaccggaaacaactttaccttcagttacacctttgaagacgttcctttccacagcagctacgctcacagtcaaagtctggaccggctgatgaatcctcttatcgaccagtacctgtattatctaaacaaaacacaatcaaatagtggaactcttcagcagtctcggctactgtttagtcaagctggacctaccagcatgtctcttcaagctaaaaactggctgcctggaccttgctacagacaacagcgtctgtcaaagcaggcaaacgacaacaacagcaactttccctggactgcggctacaaagtatcatctaaatggccgggactcgttggttaatccaggaccagctatggccagccacaaagacgatgaagaaaagtttttccccatgcatggaaccctgatatttggcaaacaaggaacaaatgctaacgacgcggatttggacaatgtcatgattacagatgaagaagaaatccgtaccaccaatcccgtggctacggagcagtacgggactgtgtcaaataatttgcaaaactcaaatactggtccaactactggaactgtcaatcaccaaggagcgttacctggtatggtgtggcaggatcgagacgtgtaccttcagggacccatttgggccaagattcctcacaccgatggacactttcacccttctccgctgatgggaggttttggactcaaacacccgcctcctcagatcatgatcaaaaacactcccgttccagccaatcctcccacaaacttcagttctgccaagtttgcttctttcatcacacagtattccacgggacaggttagcgtggagatcgagtgggagctgcagaaggagaacagcaaacgctggaaccccgagatccagtacacttccaactacaacaagtctgttaatgtggactttactgtggacactaatggtgtgtattcagagcctcgccccattggcaccagatacctgactcgtaatctgtaa

SEQ ID NO: 3699 - DNA, 2208 bp, Artificial Sequence
  source: /note="Description of Artificial Sequence: Synthetic polynucleotide"
atggctgccgatggttatcttccagattggctcgaggacactctctctgaaggaataagacagtggtggaagctcaaacctggcccaccaccgccaaagcccgcagagcggcataaggacgacagcaggggtcttgtgcttcctgggtacaagtacctcggacccttcaacggactcgacaagggagagccggtcaacgaggcagacgccgcggccctcgagcacgacaaggcctacgaccggcagctcgacagcggagacaacccgtacctcaagtacaaccacgccgacgcggagtttcaggagcgccttaaagaagatacgtcttttgggggcaacctcggacgagcagtattccaggcgaaaaagagggttcttgaacctctgggcctggttgaggagcctgttaagacggctccgggaaaaaagaggccggtagagcactctcctgtggagccagactcctcctcgggaaccggaaaagcgggccagcagcctgcgagaaagagattgaattttggtcagactggagacgcagactccgtacctgacccccagcctctcggacagccaccagcagcccccacaagtttgggatctactacaatggctacaggcagtggcgcaccaatggcagacaataacgagggtgccgatggagtgggtaattcctcaggaaattggcattgcgattcccaatggttgggcgacagagtcatcaccaccagcacccgaacctgggccctgcccacctacaacaaccacctctacaagcaaatctccagccaatcaggagccagcaacgacaaccactactttggctacagcaccccctgggggtattttgacttcaacagattccactgccacttttcaccacgtgactggcaaagactcatcaacaacaactggggattccgacccaagagactcaacttcaagctctttaacattcaagtcaaagaggtcacgcagaatgacggtacgacgacgattgccaataaccttaccagcacggttcaggtgtttactgactcggagtaccagctcccgtacgtcctcggctcggcgcatcaaggatgcctcccgccgtttccagcggacgtcttcatggtcccacagtatggatacctcaccctgaacaacgggagtcaggcggtaggacgctcttccttttactgcctggagtactttccttctcagatgcttcgtaccggaaacaactttaccttcagttacacctttgaagacgttcctttccacagcagctacgctcacagtcaaagtctggaccggctgatgaatcctcttatcgaccagtacctgtattatctaaacaaaacacaatcaaatagtggaactcttcagcagcctcggctactgtttagtcaagctggacctaccagcatgtctcttcaagctaaaaactggctgcctggaccttgctacagacaacagcgtctgtcaaagcaggcaaacgacaacaacaacagcaactttccctggactgcggctacaaagtatcatctaaatggccgggactcgttggttaatccaggaccagctatggccagccacaaagacgatgaagaaaagtttttccccatgcatggaaccctgatatttggcaaacaaggaacaaatgctaacgacgcggatttggacaatgtcatgattacagatgaagaagaaatccgtaccaccaatcccgtggctacggagcagtacgggactgtgtcaaataatttgcaaaactcaaatactggtccaactactggaactgtcaatcaccaaggagcgttacctggtatggtgtggcaggatcgagacgtgtaccttcagggacccatttgggccaagattcctcacaccgatggacactttcacccttctccgctgatgggaggttttggactcaaacacccgcctcctcagatcatgatcaaaaacactcccgttccagccaatcctcccacaaacttcagttctgccaagtttgcttctttcatcacacagtattccacgggacaggttagcgtggagatcgagtgggagctgcagaaggagaacagcaaacgctggaaccccgagatccagtacacttccaactacaacaagtctgttaatgtggactttactgtggacactaatggtgtgtattcagagcctcgccccattggcaccagatacctgactcgtaatctgtaa

SEQ ID NO: 3700 - DNA, 2205 bp, Artificial Sequence
  source: /note="Description of Artificial Sequence: Synthetic polynucleotide"
atggctgccgatggttatcttccagattggctcgaggacactctctctgaaggaataagacagtggtggaagctcaaacctggcccaccaccgccaaagcccgcagagcggcataaggacgacagcaggggtcttgtgcttcctgggtacaagtacctcggacccttcaacggactcgacaagggagagccggtcaacgaggcagacgccgcggccctcgagcacgacaaggcctacgaccggcagctcgacagcggagacaacccgtacctcaagtacaaccacgccgacgcggagtttcaggagcgccttaaagaagatacgtcttttgggggcaacctcggacgagcagtattccaggcgaaaaagagggttcttgaacctctgggcctggttgaggagcctgttaagacggctccgggaaaaaagaggccggtagagcactctcctgtggagccagactcctcctcgggaaccggaaaagcgggccagcagcctgcgagaaagagattgaattttggtcagactggagacgcagactccgtacctgacccccagcctctcggacagccaccagcagcccccacaagtttgggatctactacaatggctacaggcagtggcgcaccaatggcagacaataacgagggtgccgatggagtgggtaattcctcaggaaattggcattgcgattcccaatggttgggcgacagagtcatcaccaccagcacccgaacctgggccctgcccacctacaacaaccacctctacaagcaaatctccagccaatcaggagccagcaacgacaaccactactttggctacagcaccccctgggggtattttgacttcaacagattccactgccacttttcaccacgtgactggcaaagactcatcaacaacaactggggattccgacccaagagactcaacttcaagctctttaacattcaagtcaaagaggtcacgcagaatgacggtacgacgacgattgccaataaccttaccagcacggttcaggtgtttactgactcggagtaccagctcccgtacgtcctcggctcggcgcatcaaggatgcctcccgccgtttccagcggacgtcttcatggtcccacagtatggatacctcaccctgaacaacgggagtcaggcggtaggacgctcttccttttactgcctggagtactttccttctcagatgcttcgtaccggaaacaactttaccttcagttgcacctttgaagacgttcctttccacagcagctacgctcacagtcaaagtctggaccggctgatgaatcctcttatcgaccagtacctgtattatctaaacaaaacacaatcaaatagtggaactcttcagcagtctcggctactgtttagtcaagctggacctaccagcatgtctcttcaagctaaaaactggctgcctggaccttgctacagacaacagcgtctgtcaaagcaggcaaacgacaacaacagcaactttccctggactgcggctacaaagtatcatctaaatggccgggactcgttggttaatccaggaccagctatggccagccacaaagacgatgaagaaaagtttttccccatgcatggaaccctgatatttggcaaacaaggaacaaatgctaacgacgcggatttggacaatgtcatgattacagatgaagaagaaatccgtaccaccaatcccgtggctacggagcagtacgggactgtgtcaaataatttgcaaaactcaaatactggtccaactactggaactgtcaatcaccaaggagcgttacctggtatggtgtggcaggatcgagacgtgtaccttcagggacccatttgggccaagattcctcacaccgatggacactttcacccttctccgctgatgggaggttttggactcaaacacccgcctcctcagatcatgatcaaaaacactcccgttccagccaatcctcccacaaacttcagttctgccaagtttgcttctttcatcacacagtattccacgggacaggttagcgtggagatcgagtgggagctgcagaaggagaacagcaaacgctggaaccccgagatccagtacacttccaactacaacaagtctgttaatgtggactttactgtggacactaatggtgtgtattcagagcctcgccccattggcaccagatacctgactcgtaatctgtaa

SEQ ID NO: 3701 - DNA, 2208 bp, Artificial Sequence
  source: /note="Description of Artificial Sequence: Synthetic polynucleotide"
atggctgccgatggttatcttccagattggctcgaggacactctctctgaaggaataagacagtggtggaagctcaaacctggcccaccaccgccaaagcccgcagagcggcataaggacgacagcaggggtcttgtgcttcctgggtacaagtacctcggacccttcaacggactcgacaagggagagccggtcaacgaggcagacgccgcggccctcgagcacgacaaggcctacgaccggcagctcgacagcggagacaacccgtacctcaagtacaaccacgccgacgcggagtttcaggagcgccttaaagaagatacgtcttttgggggcaacctcggacgagcagtattccaggcgaaaaagagggttcttgaacctctgggcctggttgaggagcctgttaagacggctccgggaaaaaagaggccggtagagcactctcctgtggagccagactcctcctcgggaaccggaaaagcgggccagcagcctgcgagaaagagattgaattttggtcagactggagacgcagactccgtacctgacccccagcctctcggacagccaccagcagcccccacaagtttgggatctactacaatggctacaggcagtggcgcaccaatggcagacaataacgagggtgccgatggagtgggtaattcctcaggaaattggcattgcgattcccaatggttgggcgacagagtcatcaccaccagcacccgaacctgggccctgcccacctacaacaaccacctctacaagcaaatctccagccaatcaggagccagcaacgacaaccactactttggctacagcaccccctgggggtattttgacttcaacagattccactgccacttttcaccacgtgactggcaaagactcatcaacaacaactggggattccgacccaagagactcaacttcaagctctttaacattcaagtcaaagaggtcacgcagaatgacggtacgacgacgattgccaataaccttaccagcacggttcaggtgtttactgactcggagtaccagctcccgtacgtcctcggctcggcgcatcaaggatgcctcccgccgtttccagcggacgtcttcatggtcccacagtatggatacctcaccctgaacaacgggagtcaggcggtaggacgctcttccttttactgcctggagtactttccttctcagatgcttcgtaccggaaacaactttaccttcagttgcacctttgaagacgttcctttccacagcagctacgctcacagtcaaagtctggaccggctgatgaatcctcttatcgaccagtacctgtattatctaaacaaaacacaatcaaatagtggaactcttcagcagtctcggctactgtttagtcaagctggacctaccagcatgtctcttcaagctaaaaactggctgcctggaccttgctacagacaacagcgtctgtcaaagcaggcaaacgacaacaacaacagcaactttccctggactgcggctacaaagtatcatctaaatggccgggactcgttggttaatccaggaccagctatggccagccacaaagacgatgaagaaaagtttttccccatgcatggaaccctgatatttggcaaacaaggaacaaatgctaacgacgcggatttggacaatgtcatgattacagatgaagaagaaatccgtaccaccaatcccgtggctacggagcagtacgggactgtgtcaaataatttgcaaaactcaaatactggtccaactactggaactgtcaatcaccaaggagcgttacctggtatggtgtggcaggatcgagacgtgtaccttcagggacccatttgggccaagattcctcacaccgatggacactttcacccttctccgctgatgggaggttttggactcaaacacccgcctcctcagatcatgatcaaaaacactcccgttccagccaatcctcccacaaacttcagttctgccaagtttgcttctttcatcacacagtattccacgggacaggttagcgtggagatcgagtgggagctgcagaaggagaacagcaaacgctggaaccccgagatccagtacacttccaactacaacaagtctgttaatgtggactttagtgtggacactaatggtgtgtattcagagcctcgccccattggcaccagatacctgactcgtaatctgtaa

SEQ ID NO: 3702 - DNA, 2208 bp, Artificial Sequence
  source: /note="Description of Artificial Sequence: Synthetic polynucleotide"
atggctgccgatggttatcttccagattggctcgaggacactctctctgaaggaataagacagtggtggaagctcaaacctggcccaccaccgccaaagcccgcagagcggcataaggacgacagcaggggtcttgtgcttcctgggtacaagtacctcggacccttcaacggactcgacaagggagagccggtcaacgaggcagacgccgcggccctcgagcacgacaaggcctacgaccggcagctcgacagcggagacaacccgtacctcaagtacaaccacgccgacgcggagtttcaggagcgccttaaagaagatacgtcttttgggggcaacctcggacgagcagtattccaggcgaaaaagagggttcttgaacctctgggcctggttgaggagcctgttaagacggctccgggaaaaaagaggccggtagagcactctcctgtggagccagactcctcctcgggaaccggaaaagcgggccagcagcctgcgagaaagagattgaattttggtcagactggagacgcagactccgtacctgacccccagcctctcggacagccaccagcagcccccacaagtttgggatctactacaatggctacaggcagtggcgcaccaatggcagacaataacgagggtgccgatggagtgggtaattcctcaggaaattggcattgcgattcccaatggttgggcgacagagtcatcaccaccagcacccgaacctgggccctgcccacctacaacaaccacctctacaagcaaatctccagccaatcaggagccagcaacgacaaccactactttggctacagcaccccctgggggtattttgacttcaacagattccactgccacttttcaccacgtgactggcaaagactcatcaacaacaactggggattccgacccaagagactcaacttcaagctctttaacattcaagtcaaagaggtcacgcagaatgacggtacgacgacgattgccaataaccttaccagcacggttcaggtgtttactgactcggagtaccagctcccgtacgtcctcggctcggcgcatcaaggatgcctcccgccgtttccagcggacgtcttcatggtcccacagtatggatacctcaccctgaacaacgggagtcaggcggtaggacgctcttccttttactgcctggagtactttccttctcagatgcttcgtaccggaaacaactttaccttcagttgcacctttgaagacgttcctttccacagcagctacgctcacagtcaaagtctggaccggctgatgaatcctcttatcgaccagtacctgtattatctaaacaaaacacaatcaaatagtggaactcttcagcagtctcggctactgtttagtcaagctggacctaccagcatgtctcttcaagctaaaaactggctgcctggaccttgctacagacaacagcgtctgtcaaagcaggcaaacgacaacaacaacagcaactttccctggactgcggctacaaagtatcatctaaatggccgggactcgttggttaatccaggaccagctatggccagccacaaagacgatgaagaaaagtttttccccatgcatggaaccctgatatttggcaaacaaggaacaaatgctaacgacgcggatttggacaatgtcatgattacagatgaagaagaaatccgtaccaccaatcccgtggctacggagcagtacgggactgtgtcaaataatttgcaaaactcaaatactggtccaactactggaactgtcaatcaccaaggagcgttacctggtatggtgtggcaggatcgagacgtgtaccttcagggacccatttgggccaagattcctcacaccgatggacactttcacccttctccgctgatgggaggttttggactcaaacacccgcctcctcagatcatgatcaaaaacactcccgttccagccaatcctcccacaaacttcagttctgccaagtttgcttctttcatcacacagtattccacgggacaggttagcgtggagatcgagtgggagctgcagaaggagaacagcaaacgctggaaccccgagatccagtacacttccaactacaacaagtctgttaatgtggactttactgtggacactaatggtgtgtattcagagcctcgccccattggcaccagatacctgactcgtaatctgtaa

SEQ ID NO: 3703 - DNA, 2208 bp, Artificial Sequence
  source: /note="Description of Artificial Sequence: Synthetic polynucleotide"
atggctgccgatggttatcttccagattggctcgaggacactctctctgaaggaataagacagtggtggaagctcaaacctggcccaccaccgccaaagcccgcagagcggcataaggacgacagcaggggtcttgtgcttcctgggtacaagtacctcggacccttcaacggactcgacaagggagagccggtcaacgaggcagacgccgcggccctcgagcacgacaaggcctacgaccggcagctcgacagcggagacaacccgtacctcaagtacaaccacgccgacgcggagtttcaggagcgccttaaagaagatacgtcttttgggggcaacctcggacgagcagtattccaggcgaaaaagagggttcttgaacctctgggcctggttgaggagcctgttaagacggctccgggaaaaaagaggccggtagagcactctcctgtggagccagactcctcctcgggaaccggaaaagcgggccagcagcctgcgagaaagagattgaattttggtcagactggagacgcagactccgtacctgacccccagcctctcggacagccaccagcagcccccacaagtttgggatctactacaatggctacaggcagtggcgcaccaatggcagacaataacgagggtgccgatggagtgggtaattcctcaggaaattggcattgcgattcccaatggttgggcgacagagtcatcaccaccagcacccgaacctgggccctgcccacctacaacaaccacctctacaagcaaatctccagccaatcaggagccagcaacgacaaccactactttggctacagcaccccctgggggtattttgacttcaacagattccactgccacttttcaccacgtgactggcaaagactcatcaacaacaactggggattccgacccaagagactcaacttcaagctctttaacattcaagtcaaagaggtcacgcagaatgacggtacgacgacgattgccaataaccttaccagcacggttcaggtgtttactgactcggagtaccagctcccgtacgtcctcggctcggcgcatcaaggatgcctcccgccgtttccagcggacgtcttcatggtcccacagtatggatacctcaccctgaacaacgggagtcaggcggtaggacgctcttccttttactgcctggagtactttccttctcagatgcttcgtaccggaaacaactttaccttcagttacacctttgaagacgttcctttccacagcagctacgctcacagtcaaagtctggaccggctgatgaatcctcttatcgaccagtacctgtattatctaaacaaaacacaatcaaatagtggaactcttcagcagtctcggctactgtttagtcaagctggacctaccagcatgtctcttcaagctaaaaactggctgcctggaccttgctacagacaacagcgtctgtcaaagcaggcaaacgacaacaacaacagcaactttccctggactgcggctacaaagtatcatctaaatggccgggactcgttggttaatccaggaccagctatggccagccacaaagacgatgaagaaaagtttttccccatgcatggaaccctgatatttggcaaacaaggaacaaatgctaacgacgcggatttggacaatgtcatgattacagatgaagaagaaatccgtaccaccaatcccgtggctacggagcagtacgggactgtgtcaaataatttgcaaaactcaaatactggtccaactactggaactgtcaatcaccaaggagcgttacctggtatggtgtggcaggatcgagacgtgtaccttcagggacccatttgggccaagattcctcacaccgatggacactttcacccttctccgctgatgggaggttttggactcaaacacccgcctcctcagatcatgatcaaaaacactcccgttccagccaatcctcccacaaacttcagttctgccaagtttgcttctttcatcacacagtattccacgggacaggttagcgtggagatcgagtgggagctgcagaaggagaacagcaaacgctggaaccccgagatccagtacacttccaactacaacaagtctgttaatgtggactttagtgtggacactaatggtgtgtattcagagcctcgccccattggcaccagatacctgactcgtaatctgtaa

SEQ ID NO: 3704 - DNA, 2208 bp, Artificial Sequence
  source: /note="Description of Artificial Sequence: Synthetic polynucleotide"
atggctgccgatggttatcttccagattggctcgaggacactctctctgaaggaataagacagtggtggaagctcaaacctggcccaccaccgccaaagcccgcagagcggcataaggacgacagcaggggtcttgtgcttcctgggtacaagtacctcggacccttcaacggactcgacaagggagagccggtcaacgaggcagacgccgcggccctcgagcacgacaaggcctacgaccggcagctcgacagcggagacaacccgtacctcaagtacaaccacgccgacgcggagtttcaggagcgccttaaagaagatacgtcttttgggggcaacctcggacgagcagtattccaggcgaaaaagagggttcttgaacctctgggcctggttgaggagcctgttaagacggctccgggaaaaaagaggccggtagagcactctcctgtggagccagactcctcctcgggaaccggaaaagcgggccagcagcctgcgagaaagagattgaattttggtcagactggagacgcagactccgtacctgacccccagcctctcggacagccaccagcagcccccacaagtttgggatctactacaatggctacaggcagtggcgcaccaatggcagacaataacgagggtgccgatggagtgggtaattcctcaggaaattggcattgcgattcccaatggttgggcgacagagtcatcaccaccagcacccgaacctgggccctgcccacctacaacaaccacctctacaagcaaatctccagccaatcaggagccagcaacgacaaccactactttggctacagcaccccctgggggtattttgacttcaacagattccactgccacttttcaccacgtgactggcaaagactcatcaacaacaactggggattccgacccaagagactcaacttcaagctctttaacattcaagtcaaagaggtcacgcagaatgacggtacgacgacgattgccaataaccttaccagcacggttcaggtgtttactgactcggagtaccagctcccgtacgtccccggctcggcgcatcaaggatgcctcccgccgtttccagcggacgtcttcatggtcccacagtatggatacctcaccctgaacaacgggagtcaggcggtaggacgctcttccttttactgcctggagtactttccttctcagatgcttcgtaccggaaacaactttaccttcagttgcacctttgaagacgttcctttccacagcagctacgctcacagtcaaagtctggaccggctgatgaatcctcttatcgaccagtacctgtattatctaaacaaaacacaatcaaatagtggaactcttcagcagcctcggctactgtttagtcaagctggacctaccagcatgtctcttcaagctaaaaactggctgcctggaccttgctacagacaacagcgtctgtcaaagcaggcaaacgacaacaacaacagcaactttccctggactgcggctacaaagtatcatctaaatggccgggactcgttggttaatccaggaccagctatggccagccacaaagacgatgaagaaaagtttttccccatgcatggaaccctgatatttggcaaacaaggaacaaatgctaacgacgcggatttggacaatgtcatgattacagatgaagaagaaatccgtaccaccaatcccgtggctacggagcagtacgggactgtgtcaaataatttgcaaaactcaaatactggtccaactactggaactgtcaatcaccaaggagcgttacctggtatggtgtggcaggatcgagacgtgtaccttcagggacccatttgggccaagattcctcacaccgatggacactttcacccttctccgctgatgggaggttttggactcaaacacccgcctcctcagatcatgatcaaaaacactcccgttccagccaatcctcccacaaacttcagttctgccaagtttgcttctttcatcacacagtattccacgggacaggttagcgtggagatcgagtgggagctgcagaaggagaacagcaaacgctggaaccccgagatccagtacacttccaactacaacaagtctgttaatgtggactttactgtggacactaatggtgtgtattcagagcctcgccccattggcaccagatacctgactcgtaatctgtaa

SEQ ID NO: 3705 - DNA, 2208 bp, Artificial Sequence
  source: /note="Description of Artificial Sequence: Synthetic polynucleotide"
atggctgccgatggttatcttccagattggctcgaggacactctctctgaaggaataagacagtggtggaagctcaaacctggcccaccaccgccaaagcccgcagagcggcataaggacgacagcaggggtcttgtgcttcctgggtacaagtacctcggacccttcaacggactcgacaagggagagccggtcaacgaggcagacgccgcggccctcgagcacgacaaggcctacgaccggcagctcgacagcggagacaacccgtacctcaagtacaaccacgccgacgcggagtttcaggagcgccttaaagaagatacgtcttttgggggcaacctcggacgagcagtattccaggcgaaaaagagggttcttgaacctctgggcctggttgaggagcctgttaagacggctccgggaaaaaagaggccggtagagcactctcctgtggagccagactcctcctcgggaaccggaaaagcgggccagcagcctgcgagaaagagattgaattttggtcagactggagacgcagactccgtacctgacccccagcctctcggacagccaccagcagcccccacaagtttgggatctactacaatggctacaggcagtggcgcaccaatggcagacaataacgagggtgccgatggagtgggtaattcctcaggaaattggcattgcgattcccaatggttgggcgacagagtcatcaccaccagcacccgaacctgggccctgcccacctacaacaaccacctctacaagcaaatctccagccaatcaggagccagcaacgacaaccactactttggctacagcaccccctgggggtattttgacttcaacagattccactgccacttttcaccacgtgactggcaaagactcatcgacaacaactggggattccgacccaagagactcaacttcaagctctttaacattcaagtcaaagaggtcacgcagaatgacggtacgacgacgattgccaataaccttaccagcacggttcaggtgtttactgactcggagtaccagctcccgtacgtcctcggctcggcgcatcaaggatgcctcccgccgttttcagcggacgtcttcatggtcccacagtatggatacctcaccctgaacaacgggagtcaggcggtaggacgctcttccttttactgcctggagtactttccttctcagatgcttcgtaccggaaacaactttaccttcagttacacctttgaagacgttcctttccacagcagctacgctcacagtcaaagtctggaccggctgatgaatcctcttatcgaccagtacctgtattatctaaacaaaacacaatcaaatagtggaactcttcagcagtctcggctactgtttagtcaagctggacctaccagcatgtctcttcaagctaaaaactggctgcctggaccttgctacagacaacagcgtctgtcaaagcaggcaaacgacaacaacaacagcaactttccctggactgcggctacaaagtatcatctaaatggccgggactcgttggttaatccaggaccagctatggccagccacaaagacgatgaagaaaagtttttccccatgcatggaaccctgatatttggcaaacaaggaacaaatgctaacgacgcggatttggacaatgtcatgattacagatgaagaagaaatccgtaccaccaatcccgtggctacggagcagtacgggactgtgtcaaataatttgcaaaactcaaatactggtccaactactggaactgtcaatcaccaaggagcgttacctggtatggtgtggcaggatcgagacgtgtaccttcagggacccatttgggccaagattcctcacaccgatggacactttcacccttctccgctgatgggaggttttggactcaaacacccgcctcctcagatcatgatcaaaaacactcccgttccagccaatcctcccgcaaacttcagttctgccaagtttgcttctttcatcacacagtattccacgggacaggttagcgtggagatcgagtgggagctgcagaaggagaacagcaaacgctggaaccccgagatccagtacacttccaactacaacaagtctgttaatgtggactttactgtggacactaatggtgtgtattcagagcctcgccccattggcaccagatacctgactcgtaatctgtaa

SEQ ID NO: 3706 - DNA, 2208 bp, Artificial Sequence
  source: /note="Description of Artificial Sequence: Synthetic polynucleotide"
atggctgccgatggttatcttccagattggctcgaggacactctctctgaaggaataagacagtggtggaagctcaaacctggcccaccaccgccaaagcccgcagagcggcataaggacgacagcaggggtcttgtgcttcctgggtacaagtacctcggacccttcaacggactcgacaagggagagccggtcaacgaggcagacgccgcggccctcgagcacgacaaggcctacgaccggcagctcgacagcggagacaacccgtacctcaagtacaaccacgccgacgcggagtttcaggagcgccttaaagaagatacgtcttttgggggcaacctcggacgagcagtattccaggcgaaaaagagggttcttgaacctctgggcctggttgaggagcctgttaagacggctccgggaaaaaagaggccggtagagcactctcctgtggagccagactcctcctcgggaaccggaaaagcgggccagcagcctgcgagaaagagattgaattttggtcagactggagacgcagactccgtacctgacccccagcctctcggacagccaccagcagcccccacaagtttgggatctactacaatggctacaggcagtggcgcaccaatggcagacaataacgagggtgccgatggagtgggtaattcctcaggaaattggcattgcgattcccaatggttgggcgacagagtcatcaccaccagcacccgaacctgggccctgcccacctacaacaaccacctctacaagcaaatctccagccaatcaggagccagcaacgacaaccactactttggctacagcaccccctgggggtattttgacttcaacagattccactgccacttttcaccacgtgactggcaaagactcatcaacaacaactggggattccgacccaagagactcaacttcaagctctttaacattcaagtcaaagaggtcacgcagaatgacggtacgacgacgattgccaataaccttaccggcacggttcaggtgtttactgactcggagtaccagctcccgtacgtcctcggctcggcgcatcaaggatgcctcccgccgtttccagcggacgtcttcatggtcccacagtatggatacctcaccctgaacaacgggagtcaggcggtaggacgctcttccttttactgcctggagtactttccttctcagatgcttcgtaccggaaacaactttaccttcagttacacctttgaagacgttcctttccacagcagctacgctcacagtcaaagtctggaccggctgatgaatcctcttatcgaccagtacctgtattatctaaacaaaacacaatcaaatagtggaactcttcagcagtctcggctactgtttagtcaagctggacctaccagcatgtctcttcaagctaaaaactggctgcctggaccttgctacagacaacagcgtctgtcaaagcaggcaaacgacaacaacaacagcaactttccctggactgcggctacaaagtatcatctaaatggccgggactcgttggttaatccaggaccagctatggccagccacaaagacgatgaagaaaagtttttccccatgcatggaaccctgatatttggcaaacaaggaacaaatgctaacgacgcggatttggacaatgtcatgattacagatgaagaagaaatccgtaccaccaatcccgtggctacggagcagtacgggactgtgtcaaataatttgcaaaactcaaatactggtccaactactggaactgtcaatcaccaaggagcgttacctggtatggtgtggcaggatcgagacgtgtaccttcagggacccatttgggccaagattcctcacaccgatggacactttcacccttctccgctgatgggaggttttggactcaaacacccgcctcctcagatcatgatcaaaaacactcccgttccagccaatcctcccacaaacttcagttctgccaagtttgcttctttcatcacacagtattccacgggacaggttagcgtggagatcgagtgggagctgcagaaggagaacagcaaacgctggaaccccgagatccagtacacttccaactacaacaagtctgttaatgtggactttactgtggacactaatggtgtgtattcagagcctcgccccattggcaccagatacctgactcgtaatctgtaa

SEQ ID NO: 3707 - DNA, 2208 bp, Artificial Sequence
  source: /note="Description of Artificial Sequence: Synthetic polynucleotide"
atggctgccgatggttatcttccagattggctcgaggacactctctctgaaggaataagacagtggtggaagctcaaacctggcccaccaccgccaaagcccgcagagcggcataaggacgacagcaggggtcttgtgcttcctgggtacaagtacctcggacccttcaacggactcgacaagggagagccggtcaacgaggcagacgccgcggccctcgagcacgacaaggcctacgaccggcagctcgacagcggagacaacccgtacctcaagtacaaccacgccgacgcggagtttcaggagcgccttaaagaagatacgtcttttgggggcaacctcggacgagcagtattccaggcgaaaaagagggttcttgaacctctgggcctggctgaggagcctgttaagacggctccgggaaaaaagaggccggtagagcactctcctgtggagccagactcctcctcgggaaccggaaaagcgggccagcagcctgcgagaaagagattgaattttggtcagactggagacgcagactccgtacctgacccccagcctctcggacagccaccagcagcccccacaagtttgggatctactacaatggctacaggcagtggcgcaccaatggcagacaataacgagggtgccgatggagtgggtaattcctcaggaaattggcattgcgattcccaatggttgggcgacagagtcatcaccaccagcacccgaacctgggccctgcccacctacaacaaccacctctacaagcaaatctccagccaatcaggagccagcaacgacaaccactactttggctacagcaccccctgggggtattttgacttcaacagattccactgccacttttcaccacgtgactggcaaagactcatcaacaacaactggggattccgacccaagagactcaacttcaagctctttaacattcaagtcaaagaggtcacgcagaatgacggtacgacgacgattgccaataaccttaccagcacggttcaggtgtttactgactcggagtaccagctcccgtacgtcctcggctcggcgcatcaaggatgcctcccgccgtttccagcggacgtcttcatggtcccacagtatggatacctcaccctgaacaacgggagtcaggcggtaggacgctcttccttttactgcctggagtactttccttctcagatgcttcgtaccggaaacaactttaccttcagttacacctttgaagacgttcctttccacagcagctacgctcacagtcaaagtctggaccggctgatgaatcctcttatcgaccagtacctgtattatctaaacaaaacacaatcaaatagtggaactcttcagcagtctcggctactgtttagtcaagctggacctaccagcatgtctcttcaagctaaaaactggctgcctggaccttgctacagacaacagcgtctgtcaaagcaggcaaacgacaacaacaacagcaactttccctggactgcggctacaaagtatcatctaaatggccgggactcgttggttaatccaggaccagctatggccagccacaaagacgatgaagaaaagtttttccccatgcatggaaccctgatatttggcaaacaaggaacaaatgctaacgacgcggatttggacaatgtcatgattacagatgaagaagaaatccgtaccaccaatcccgtggctacggagcagtacgggactgtgtcaaataatttgcaaaactcaaatactggtccaactactggaactgtcaatcaccaaggagcgttacctggtatggtgtggcaggatcgagacgtgtaccttcagggacccatttgggccaagattcctcacaccgatggacactttcacccttctccgctgatgggaggttttggactcaaacacccgcctcctcagatcatgatcaaaaacactcccgttccagccaatcctcccacaaacttcagttctgccaagtttgcttctttcatcacacagtattccacgggacaggttagcgtggagatcgagtgggagctgcagaaggagaacagcaaacgctggaaccccgagatccagtacacttccaactacaacaagtctgttaatgtggactttactgtggacactaatggtgtgtattcagagcctcgccccattggcaccagatacctgactcgtaatctgtaa

SEQ ID NO: 3708 - DNA, 2208 bp, Artificial Sequence; identical to SEQ ID NO: 3637
  source: /note="Description of Artificial Sequence: Synthetic polynucleotide"

SEQ ID NO: 3709 - DNA, 2208 bp, Artificial Sequence
  source: /note="Description of Artificial Sequence: Synthetic polynucleotide"
atggctgccgatggttatcttccagattggctcgaggacactctctctgaaggaataagacagtggtggaagctcaaacctggcccaccaccaccaaggcccgcagagcggcatcaggacgacagcaggggtcttgtgcttcctgggtacaagtacctcggacccttcaacggactcgacaaaggagagccggtcaacgaggcagacgctgcggccctcgagcacgacaaggcctacgaccggcagctcgacagcggagacaacccgtacctcaagtacaaccacgccgacgcggagtttcaggagcgtcttaaagaagatacgtcttttgggggcaacctcggacgagcagtcttccaggcgaaaaagagggttcttgaacctctgggcctggttgaggaacctgttaagacggctccgggaaaaaagaggccggtagagcactctcctgcggagccagactcctcctcgggaaccggaaaagcgggccagcagcctgcaagaaagagattgaatttcggtcagactggagacgcagactccgtacctgacccccagcctctcggacagccaccagcagcccccacaagtttgggatctactacaatggctacaggcagtggcgcaccaatggcagacaataacgagggtgccgatggagtgggtaattcctcaggaaattggcattgcgattcccaatggctgggcgacagagtcatcaccaccagcacccgaacctgggccctgcccacctacaacaaccacctctacaagcaaatctccagccaatcaggagcatcgaacgacaaccactactttggctacagcaccccttgggggtattttgacttcaacagattccactgtcacttctccccacgtgactggcaaagactcatcaacaacaactggggattccgacccaagagactcaacttcaagctctttaacattcaagtcaaagaggtcacgcagaatgacggtacgacgacgattgccaataaccttaccagcacggttcaggtgtttactgactcggagtaccagctcccgtacgtcctcggctcggcgcatcaaggatgcctcccgccgtttccagcggacgtcttcatggtcccacagtatggatacctcaccctgaacaacgggagtcaggcggtaggacgctcttccttttactgcctggagtactttccttctcagatgctgcgtaccggaaacaactttaccttcagctacacctttgaggacgtgcccttccacagcagctacgctcacagccagagtttggaccggctgatgaatcctctgatcgaccagtatctgtattatctgaacaggacacaatcaaatagtggaactcttcagcagtctaggctactgtttagccaagctggacccaccagcatgtcccttcaagctaaaaactggctgcctggaccttgctacagacagcagcgtctgtcaaagcaggcaaacgacaacaacaacagcaactttccctggactgcggctacaaagtatcatctaaatggtcgggactcgttggttaatccaggaccagctatggccagccacaaagacgatgaagaaaagtttttccccatgcatggaaccctgatatttggtaaacaaggaacaaatgctaacgacgcggatttggaacatgtcatgattacaggtgaagaagaaatcaggaccaccaatcccgtggctacagagcagtacggaaacgtgtcaaataatttgcaaaactcaaatactggtccaactacagaaaatgtcaatcaccagggagcgttacctggtatggtgtggcaggatcgagacgtgtacctgcagggacccatttgggccaagattcctcacaccgacggacactttcacccttctccactgatgggaggttttggactcaaacacccgcctcctcaaatcatgatcaaaaacactcctgttccagccaatcctcctacaaacttcagcgcggcaaagtttgcttccttcatcacacagtattccacgggacaggtcagcgtggagatcgagtgggagctgcagaaggagaacagcaaacgctggaaccccgagatccagtacacttccaactacaacaaatctgttaatgtggactttactgtggacgctaatggtgtgtattcagagcctcgccccattggcaccagatacctgactcgtaatctgtaa

SEQ ID NO: 3710 - DNA, 2208 bp, Artificial Sequence
  source: /note="Description of Artificial Sequence: Synthetic polynucleotide"
atggctgccgatggttatcttccagattggctcgaggacactctctctgaaggaataagacagtggtggaagctcaaacctggcccaccaccaccaaggcccgcagagcggcatcaggacgacagcaggggtcttgtgcttcctgggtacaagtacctcggacccttcaacggactcgacaaaggagagccggtcaacgaggcagacgctgcggccctcgagcacgacaaggcctacgaccggcagctcgacagcggagacaacccgtacctcaagtacaaccacgccgacgcggagtttcaggagcgtcttaaagaagatacgtcttttgggggcaacctcggacgagcagtcttccaggcgaaaaagagggttcttgaacctctgggcctggttgaggaacctgttaagacggctccgggaaaaaagaggccggtagagcactctcctgcggagccagactcctcctcgggaaccggaaaagcgggccagcagcctgcaagaaagagattgaatttcggtcagactggagacgcagactccgtacctgacccccagcctctcggacagccaccagcagcccccacaagtttgggatctactacaatggctacaggcagtggcgcaccaatggcagacaataacgagggtgccgatggagtgggtaattcctcaggaaattggcattgcgattcccaatggctgggcgacagagtcatcaccaccagcacccgaacctgggccctgcccacctacaacaaccacctctacaagcaaatctccagccaatcaggagcatcgaacgacaaccactactttggctacagcaccccyttggggtattttgacttcaacagattccactgtcacttctccccacgtgactggcaaagactcatcaacaacaactggggattccgacccaagagactcaacttcaagctctttaacattcaagtcaaagaggtcacgcagaatgacggtacgacgacgattgccaataaccttaccagcacggttcaggtgtttactgactcggagtaccagctcccgtacgtcctcggctcggcgcatcaaggatgcctcccgccgtttccagcggacgtcttcatggtcccacagtatggatacctcaccctgaacaacgggagtcaggcggtaggacgctcttccttttactgcctggagtactttccttctcagatgctgcgtaccggaaacaactttaccttcagctacacctttgaggacgtgcccttccacagcagctacgctcacagccagagtttggaccggctgatgaatcctctgatcgaccagtatctgtattatctgaacaggacacaatcaaatagtggaactcttcagcagtctaggctactgtttagccaagctggacccaccagcatgtcccttcaagctaaaaactggctgcctggaccttgctacagacagcagcgtctgtcaaagcaggcaaacgacaacaacaacagcaactttccctggactgcggctacaaagtatcatctaaatggtcgggactcgttggttaatccaggaccagctatggccagccacaaagacgatgaagaaaagtttttccccatgcatggaaccctgatatttggtaaacaaggaacaaatgctaacgacacggatttggaacatgtcatgattacagatgaagaagaaatcaggaccaccaatcccgtggctacagagcagtacggaaacgtgtcaaataatttgcaaaactcaaatactggtccaactacagaaaatgtcaatcaccagggagcgttacctggtatggtgtggcaggatcgagacgtgtacctgcagggacccatttgggccaagattcctcacaccgacggacactttcacccttctccactgatgggaggttttggactcaaacacccgcctcctcaaatcatgatcaaaaacactcctgttccagccaatcctcctacaaacttcagcgcggcaaagtttgcttccttcatcacacagtattccacgggacaggtcagcgtggagatcgagtgggagctgcagaaggagaacagcaaacgctggaaccccgagatccagtacacttccaactacaacaaatctgttaatgtggactttactgtggacgctaatggtgtgtattcagagcctcgccccattggcaccagatacctgactcgtaatctgtaa

SEQ ID NO: 3711 - DNA, 2208 bp, Artificial Sequence
  source: /note="Description of Artificial Sequence: Synthetic polynucleotide"
atggctgccgatggttatcttccagattggctcgaggacactctctctgaaggaataagacagtggtggaagctcaaacctggcccaccaccaccaaggcccgcagagcggcatcaggacgacagcaggggtcttgtgcttcctgggtacaagtacctcggacccttcaacggactcgacaaaggagagccggtcaacgaggcagacgctgcggccctcgagcacgacaaggcctacgaccggcagctcgacagcggagacaacccgtacctcaagtacaaccacgccgacgcggagtttcaggagcgtcttaaagaagatacgtcttttgggggcaacctcggacgagcagtcttccaggcgaaaaagagggttcttgaacctctgggcctggttgaggaacctgttaagacggctccgggaaaaaagaggccggtagagcactctcctgcggagccagactcctcctcgggaaccggaaaagcgggccagcagcctgcaagaaagagattgaatttcggtcagactggagacgcagactccgtacctgacccccagcctctcggacagccaccagcagcccccacaagtttgggatctactacaatggctacaggcagtggcgcaccaatggcagacaataacgagggtgccgatggagtgggtaattcctcaggaaattggcattgcgattcccaatggctgggcgacagagtcatcaccaccagcacccgaacctgggccctgcccacctacaacaaccacctctacaagcaaatctccagccaatcaggagcatcgaacgacaaccactactttggctacagcaccccttgggggtattttgacttcaacagattccactgtcacttctccccacgtgactggcaaagactcatcaacaacaactggggattccgacccaagagactcaacttcaagctctttaacattcaagtcaaagaggtcacgcagaatgacggtacgacgacgattgccaataaccttaccagcacggttcaggtgtttactgactcggagtaccagctcccgtacgtcctcggctcggcgcatcaaggatgcctcccgccgtttccagcggacgtcttcatggtcccacagtatggatacctcaccctgaacaacgggagtcaggcggtaggacgctcttccttttactgcctggagtactttccttctcagatgctgcgtaccggaaacaactttaccttcagctacacctttgaggacgtgcccttccacagcagctacgctcacagccagagtttggaccggctgatgaatcctctgatcgaccagtatctgtattatctgaacaggacacaatcaaatagtggaactcttcagcagtctaggctactgtttagccaagctggacccaccagcatgtcccttcaagctaaaaactggctgcctggaccttgctacagacagcagcgtctgtcaaagcaggcaaacgacaacaacaacagcaactttccctggactgcggctacaaagtatcatctaaatggtcgggactcgttggttaatccaggaccagctatggccagccacaaagacgatgaagaaaagtttttccccatgcatggaaccctgatatttggtaaacaaggaacaaatgctaacgacgcggatttggaacgtgtcatgattacagatgaagaagaaatcaggaccaccaatcccgtggctacagagcagtacggaaacgtgtcaaataatttgcaaaactcaaatactggtccaactacagaaaatgtcaatcaccagggagcgttacctggtatggtgtggcaggatcgagacgtgtacctgcagggacccatttgggccaagattcctcacgccgacggacactttcacccttctccactgatgggaggttttggactcaaacacccgcctcctcaaatcatgatcaaaaacactcctgttccagccaatcctcctacaaacttcagcgcggcaaagtttgcttccttcatcacacagtattccacgggacaggtcagcgtggagatcgagtgggagctgcagaaggagaacagcaaacgctggaaccccgagatccagtacacttccaactacaacaaatctgttaatgtggactttactgtggacgctaatggtgtgtattcagagcctcgccccattggcaccagatacctgactcgtaatctgtaa

SEQ ID NO: 3712 - DNA, 2208 bp, Artificial Sequence
  source: /note="Description of Artificial Sequence: Synthetic polynucleotide"
atggctgccgatggttatcttccagattggctcgaggacactctctctgaaggaataagacagtggtggaagctcaaacctggcccaccaccaccaaggcccgcagagcggcatcaggacgacagcaggggtcttgtgcttcctgggtacaagtacctcggacccttcaacggactcgacaaaggagagccggtcaacgaggcagacgctgcggccctcgagcacgacaaggcctacgaccggcagctcgacagcggagacaacccgtacctcaagtacaaccacgccgacgcggagtttcaggagcgtcttaaagaagatacgtcttttgggggcaacctcggacgagcagtcttccaggcgaaaaagagggttcttgaacctctgggcctggttgaggaacctgttaagacggctccgggaaaaaagaggccggtagagcactctcctgcggagccagactcctcctcgggaaccggaaaagcgggccagcagcctgcaagaaagagattgaatttcggtcagactggagacgcagactccgtacctgacccccagcctctcggacagccaccagcagcccccacaagtttgggatctactacaatggcaacaggcagtggcgcaccaatggcagacaataacgagggtgccgatggagtgggtaattcctcaggaaattggcattgcgattcccaatggctgggcgacagagtcatcaccaccagcacccgaacctgggccctgcccacctacaacaaccacctctacaagcaaatctccagccaatcaggagcatcgaacgacaaccactactttggctacagcaccccttgggggtattttgacttcaacagattccactgtcacttctccccacgtgactggcaaagactcatcaacaacaactggggattccgacccaagagactcaacttcaagctctttaacattcaagtcaaagaggtcacgcagaatgacggtacgacgacgattgccaataaccttaccagcacggttcaggtgtttactgactcggagtaccagctcccgtacgtcctcggctcggcgcatcaaggatgcctcccgccgtttccagcggacgtcttcatggtcccacagtatggatacctcaccctgaacaacgggagtcaggcggtaggacgctcttccttttactgcctggagtactttccttctcagatgctgcgtaccggaaacaactttaccttcagctacacctttgaggacgtgcccttccacagcagctacgctcacagccagagtttggaccggctgatgaatcctctgatcgaccagtatctgtattatctgaacaggacacaatcaaatagtggaactcttcagcagtctaggctactgtttagccaagctggacccaccagcatgtcccttcaagctaaaaactggctgcctggaccttgctacagacagcagcgtctgtcaaagcaggcaaacgacaacaacaacagcaactttccctggactgcggctacaaagtatcatctaaatggtcgggactcgttggttaatccaggaccagctatggccagccacaaagacgatgaagaaaagtttttccccatgcatggaaccctgatatttggtaaacaaggaacaaatgctaacgacgcggatttggaacatgtcatgattacagatgaagaagaaatcaggaccaccaatcccgtggctacagagcagtacggaaacgtgtcaaataatttgcaaaactcaaatactggtccaactacagaaaatgtcaatcaccagggagcgttacctggtatggtgtggcaggatcgagacgtgtacctgcagggacccatttgggccaagattcctcacaccgacggacactttcacccttctccactgatgggaggttttggactcaaacacccgcctcctcaaatcatgatcaaaaacactcctgttccagccaatcctcctacaaacttcagcgcggcaaagtttgcttccttcatcacacggtattccacgggacaggtcagcgcggagatcgagtgggagctgcagaaggagaacagcaaacgctggaaccccgagatccagtacacttccaactacaacaaatctgttaatgtggactttactgtggacgctaatggtgtgtattcagagcctcgccccattggcaccagatacctgactcgtaatctgtaa

SEQ ID NO: 3713 - DNA, 2208 bp, Artificial Sequence
  source: /note="Description of Artificial Sequence: Synthetic polynucleotide"
atggctgccgatggttatcttccagattggctcgaggacattctctctgaaggaataagacagtggtggaagctcaaacctggcccaccaccaccaaagcccgcagagcggcataaggacgacagcaggggtcttgtgcttcctgggtacaagtacctcggacccttcaacggactcgacaaaggagagccggtcaacgaggcagacgccgcggccctcgagcacgacaaggcctacgaccggcagctcgacagcggagacaacccgtacctcaagtacaaccacgccgacgcggagtttcaggagcgtcttaaagaagatacgtcttttgggggcaacctcggacgagcagtcttccaggcaaaaaagagggttcttgaacctctgggcctggttgaggaacctgttaagacggctccgggaaaaaagaggccggtagagcaatctcctgcggagccagactcctcctcgggaaccggaaaggcgggcaaccagcctgcaagaaagagattgaattttggtcagactggagacgcagactccgtacctgacccccagcctctcggacagccaccagcagccccctctggtctgggatctactacaatggctacaggcagtggcgcaccaatggcagacaataacgagggtgccgatggagtgggtaattcctcaggaaattggcattgcgattcccaatggttgggcgacagagtcatcaccaccagcacccgaacctgggccctgcccacctacaacaatcacctctacaagcaaatctccagccaatcaggagcagcgaacgacaaccactactttggctacagcaccccctgggggtattttgacttcaacagattccactgccacttttcaccacgtgactggcaaagactcatcaacaacaactggggattccgacccaaaagactcaacttcaagctctttaacattcaagtcaaagaggtcacgcagaatgacggtacgacgacgattgccaataaccttaccagcacggttcaggtgtttactgactcggagtaccagctcccgtacgtcctcggctcggcgcatcaaggatgcctcccgccgtttccagcggacgtcttcatggtcccacagtatggatacctcaccctgaacaacgggagtcaggcggtaggacgctcttccttttactgcctggagtactttccttctcagatgcttcgtaccggaaacaactttaccttcagttacacctttgaagacgttcctttccacagcagctacgctcacagtcaaagtctggaccggctgatgaatcctctgatagaccagtacctgcattatctaaacaaaacacaatcaaatagtggaactcttcagcagtctcggctactgtttagtcaagctggacccaccagcatgtctcttcaagctaaaaactggctgcctggaccttgctacagacaacagcgtctgtcaaagcaggcaaacgacaacaacaacagcaactttccctggactgcggctacaaagtatcatctaaatggccgggactcgttggttaatccaggaccagctatggccagccacaaagacgatgaagaaaagtttttccccatgcatggaaccctgatatttggtaaacaaggaacaaatgctaacgacgcggatttggacaatgtcatgattacagatgaagaagaaatccgcaccaccaatcccgtggctacggagcagtacgggactgtgtcaaataatttgcaaaactcaaatactggtccaactactggaactgtcaatcaccaaggagcgttacctggtatggtgtggcaggatcgagacgtgtaccttcagggacccatttgggccaagattcctcacaccgatggacactttcatccttctccactgatgggaggttttggactcaaacacccgcctcctcagatcatgatcaaaaacactcccgttccagccaatcctcctacaaacttcagttctgccaagtttgcttctttcatcacacagtattccacggggcaggtcagcgtggagatagagtgggagctgcagaaggagaacagcaaacgctggaaccccgagatccagtatacttccaactacaacaagtctgttaatgtggactttactgtggacactaatggtgtgtattcagagcctcgccccattggcaccagatacctgactcgtaatctgtaa

SEQ ID NO: 3714 - DNA, 2208 bp, Artificial Sequence
  source: /note="Description of Artificial Sequence: Synthetic polynucleotide"
atggctgccgatggttatcttccagattggctcgaggacactctctctgaaggaataagacagtggtggaagctcaaacctggcccaccaccaccaaggcccgcagagcggcatcaggacgacagcaggggtcttgtgcttcctgggtacaagtacctcggacccttcaacggactcgacaaaggagagccggtcaacgaggcagacgctgcggccctcgagcacgacaaggcctacgaccggcagctcgacagcggagacaacccgtacctcaagtacaaccacgccgacgcggagtttcaggagcgtcttaaagaagatacgtcttttgggggcaacctcggacgagcagtcttccaggcgaaaaagagggttcttgaacctctgggcctggttgaggaacctgttaagacggctccgggaaaaaagaggccggtagagcactctcctgcggagccagactcctcctcgggaaccggaaaagcgggccagcagcctgcaagaaagagattgaatttcggtcagactggagacgcagactccgtacctgacccccagcctctcggacagccaccagcagcccccacaagtttgggatctactacaatggctacaggcagtggcgcaccaatggcagacaataacgagggtgccgatggagtgggtaattcctcaggaaattggcattgcgattcccaatggctgggcgacagagtcatcaccaccagcacccgaacctgggccctgcccacctacaacaaccacctctacaagcaaatctccagccaatcaggagcatcgaacgacaaccactactttggctacagcaccccttgggggtattttgacttcaacagattccactgtcacttctccccacgtgactggcaaagactcatcaacaacaactggggattccgacccaagagactcaacttcaagctctttaacattcaagtcaaagaggtcacgcagaatgacggtacgacgacgattgccaataaccttaccagcacggttcaggtgtttactgactcggagtaccagctcccgtacgtcctcggctcggcgcatcaaggatgcctcccgccgtttccagcggacgtcttcatggtcccacagtatggatacctcaccctgaacaacgggagtcaggcggtaggacgctcttccttttactgcctggagtactttccttctcagatgctgcgtaccggaaacaactttaccttcagctacacctttgaggacgtgcccttccacagcagctacgctcacagccagagtttggaccggctgatgaatcctctgatcgaccagtatctgtattatctgaacaggacacaatcaaatagtggaactcttcagcagtctaggctactgtttagccaagctggacccaccagcatgtcccttcaagctaaaaactggctgcctggaccttgctacagacagcagcgtctgtcaaagcaggcaaacgacaacaacaacagcaactttccctggactgcggctacaaagtatcatctaaatggtcgggactcgttggttaatccaggaccagctatggccagccacaaagacgatgaagaaaagtttttccccatgcatggaaccctgatatttggtaaacaaggaacaaatgctaacgacgcggatttggaacatgtcatgattacagatgaagaagaaatcaggaccaccaatcccgtggctacagagcagtacggaaacgtgtcaaataatttgcaaaactcaaatactggtccgactacagaaaatgtcaatcgccagggagcgttacctggtatggtgtggcaggatcgagacgtgtacctgcagggacccatttgggccaagattcctcacaccgacggacactttcacccttctccactgatgggaggttttggactcaaacacccgcctcctcaaatcatgatcaaaaacactcctgttccagccaatcctcctacaaacttcagcgcggcaaagtttgcttccttcatcacacagtattccacgggacaggtcagcgtggagatcgagtgggagctgcagaaggagaacagcaaacgctggaaccccgagatccagtacacttccaactacaacaaatctgttaatgtggactttactgtggacgctaatggtgtgtattcagagcctcgccccattggcaccagatacctgactcgtaatctgtaa

SEQ ID NO: 3715 - DNA, 2208 bp, Artificial Sequence
  source: /note="Description of Artificial Sequence: Synthetic polynucleotide"
atggctgccgatggttatcttccagattggctcgaggacactctctctgaaggaataagacagtggtggaagctcaaacctggcccaccaccaccaaggcccgcagagcggcatcaggacgacagcaggggtcttgtgcttcctgggtacaagtacctcggacccttcaacggactcgacaaaggagagccggtcaacgaggcagacgctgcggccctcgagcacgacaaggcctacgaccggcagctcgacagcggagacaacccgtacctcaagtacaaccacgccgacgcggagtttcaggagcgtcttaaagaagatacgtcttttgggggcaacctcggacgagcagtcttccaggcgaaaaagagggttcttgaacctctgggcctggttgaggaacctgttaagacggctccgggaaaaaagaggccggtagagcactctcctgcggagccagactcctcctcgggaaccggaaaagcgggccagcagcctgcaagaaagagattgaatttcggtcagactggagacgcagactccgtacctgacccccagcctctcggacagccaccagcagcccccacaagtttgggatctactacaatggctacaggcagtggcgcaccaatggcagacaataacgagggtgccgatggagtgggtaattcctcaggaaattggcattgcgattcccaatggctgggcgacagagtcatcaccaccagcacccgaacctgggccctgcccacctacaacaaccacctctacaagcaaatctccagccaatcaggagcatcgaacgacaaccactactttggctacagcaccccttgggggtattttgacttcaacagattccactgtcacttctccccacgtgactggcaaagactcatcaacaacaactggggattccgacccaagagactcaacttcaagctctttaacattcaagtcaaagaggtcacgcagaatgacggtacgacgacgattgccaataaccttaccagcacggttcaggtgtttactgactcggagtaccagctcccgtacgtcctcggctcggcgcatcaaggatgcctcccgccgtttccagcggacgtcttcatggtcccacagtatggatacctcaccctgaacaacgggagtcaggcggtaggacgctcttccttttactgcctggagtactttccttctcagatgctgcgtaccggaaacaactttaccttcagctacacctttgaggacgtgcccttccacagcagctacgctcacagccagagtttggaccggctgatgaatcctctgatcgaccagtatctgtattatctgaacaggacacaatcaaatagtggaactcttcagcagtctaggctactgtttagccaagctgcacccaccagcatgtcccttcaagctaaaaactggctgcctggaccttgctacagacagcagcgtctgtcaaagcaggcaaacgacaacaacaacagcaactttccctggactgcggctacaaagtatcatctaaatggtcgggactcgttggttaatccaggaccagctatggccagccacaaagacgatgaagaaaagtttttccccatgcatggaaccctgatatttggtaaacaaggaacaaatgctaacgacacggatttggaacatgtcatgattacagatgaagaagaaatcaggaccaccaatcccgtggctacagagcagtacggaaacgtgtcaaataatttgcaaaactcaaatactggtccaactacagaaaatgtcaatcaccagggagcgttacctggtatggtgtggcaggatcgagacgtgtacctgcagggacccatttgggccaagattcctcacaccgacggacactttcacccttctccactgatgggaggttttggactcaaacacccgcctcctcaaatcatgatcaaaaacactcctgttccagccaatcctcctacaaacttcagcgcggcaaagtttgcttccttcatcacacagtattccacgggacaggtcagcgtggagatcgagtgggagctgcagaaggagaacagcaaacgctggaaccccgagatccagtacacttccaactacaacaaatctgttaatgtggactttactgtggacgctaatggtgtgtattcagagcctcgccccattggcaccagatacctgactcgtaatctgtaa

SEQ ID NO: 3716 - DNA, 2208 bp, Artificial Sequence
  source: /note="Description of Artificial Sequence: Synthetic polynucleotide"
atggctgccgatggttatcttccagattggctcgaggacattctctctgaaggaataagacagtggtggaagctcaaacctggcccaccaccaccaaagcccgcagagcggcataaggacgacagcaggggtcttgtgcttcctgggtacaagtacctcggacccttcaacggactcgacaaaggagagccggtcaacgaggcagacgccgcggccctcgagcacgacaaggcctacgaccggcagctcgacagcggagacaacccgtacctcaagtacaaccacgccgacgcggagtttcaggagcgtcttaaagaagatacgtcttttgggggcaacctcggacgagcagtcttccaggcaaaaaagagggttcttgaacctctgggcctggttgaggaacctgttaagacggctccgggaaaaaagaggccggtagagcaatctcctgcggagccagactcctcctcgggaaccggaaaggcgggcaaccagcctgcaagaaagagattgaattttggtcagactggagacgcagactccgtacctgacccccagcctctcggacagccaccagcagccccctctggtctgggatctactacaatggctacaggcagtggcgcaccaatggcagacaataacgagggtgccgatggagtgggtaattcctcaggaaattggcattgcgattcccaatggttgggcgacagagtcatcaccaccagcacccgaacctgggccctgcccacctacaacaatcacctctacaagcaaatctccagccaatcaggagcagcgaacgacaaccactactttggctacagcaccccctgggggtattttgacttcaacagattccactgccacttttcaccacgtgactggcaaagactcatcaacaacaactggggattccgacccaaaagactcaacttcaagctctttaacattcaagtcaaagaggtcacgcagaatgacggtacgacgacgattgccaataaccttaccagcacggttcaggtgtttactgactcggagtaccagctcccgtacgtcctcggctcggcgcatcaaggatgcctcccgccgtttccagcggacgtcttcatggtcccacagtatggatacctcaccctgaacaacgggagtcaggcggtaggacgctcttccttttactgcctggagtactttccttctcagatgcttcgtaccggaaacaactttaccttcagttacacctttgaagacgttcctttccacagcagctacgctcacagtcaaagtctggaccggctgatgaatcctctgatagaccagtacctgtattatctaaacaaaacacaatcaaatagtggaactcttcagcagtctcggctactgtttagtcaagctggacccaccagcatgtctcttcaagctaaaaactggctgcctggaccttgctacagacaacagcgtctgtcaaagcaggcaaacgacaacaacaacagcaactttccctggactgcggctacaaagtatcatctaaatggccgggactcgttggttaatccaggaccagctatggccagccacaaagacgatgaagaaaagtttttccccatgcatggaaccctgatatttggtaaacaaggaacaaatgctaacgacgcggatttggacaatgtcatgattacagatgaagaagaaatccgcaccaccaatcccgtggctacggagcagtacgggactgtgtcaaataatttgcaaaactcaaatactggtccaactactggaactgtcaatcaccaaggagcgttacctggtatggtgtggcaggatcgagacgtgtaccttcagggacccatttgggccaagattcctcacaccgatggacactttcatccttctccactgatgggaggttttggactcaaacacccgcctcctcagatcatgatcaaaaacactcccgttccagccaatcctcctacaaacttcagttctgccaagtttgcttctttcgtcacacagtattccacggggcaggtcagcgtggagatagagtgggagctgcagaaggagaacagcaaacgctggaaccccgagatccagtatacttccaactacaacaagtctgttaatgtggactttactgtggacactaatggtgtgtattcagagcctcgccccattggcaccagatacctgactcgtaatctgtaa

SEQ ID NO: 3717 - DNA, 2208 bp, Artificial Sequence
  source: /note="Description of Artificial Sequence: Synthetic polynucleotide"
atggctgccgatggttatcttccagattggctcgaggacactctctctgaaggaataagacagtggtggaagctcaaacctggcccaccaccaccaaggcccgcagagcggcatcaggacgacagcaggggtcttgtgcttcctgggtacaagtacctcggacccttcaacggactcgacaaaggagagccggtcaacgaggcagacgctgcggccctcgagcacgacaaggcctacgaccggcagctcgacagcggagacaacccgtacctcaagtacaaccacgccgacgcggagtttcaggagcgtcttaaagaagatacgtcttttgggggcaacctcggacgagcagtcttccaggcgaaaaagagggttcttgaacctctgggcctggttgaggaacctgttaagacggctccgggaaaaaagaggccggtagagcactctcctgcggagccagactcctcctcgggaaccggaaaagcgggccagcagcctgcaagaaagagattgaatttcggtcagactggagacgcagactccgtacctgacccccagcctctcggacagccaccagcagcccccacaagtttgggatctactacaatggctacaggcagtggcgcaccaatggcagacaataacgagggtgccgatggagtgggtaattcctcaggaaattggcattgcgattcccaatggctgggcgacagagtcatcaccaccagcacccgaacctgggccctgcccacctacaacaaccacctctacaagcaaatctccagccaatcaggagcatcgaacgacaaccactactttggctacagcaccccttgggggtattttgacttcaacagattccactgtcacttctccccacgtgactggcaaagactcatcaacaacaactggggattccgacccaagagactcaacttcaagctctttaacattcaagtcaaagaggtcacgcagaatgacggtacgacgacgattgccaataaccttaccagcacggttcaggtgtttactgactcggagtaccagctcccgtacgccctcggctcggcgcatcaaggatgcctcccgccgtttccagcggacgtcttcatggtcccacagtatggatacctcaccctgaacaacgggagtcaggcggtaggacgctcttccttttactgcctggagtactttccttctcagatgctgcgtaccggaaacaactttaccttcagctacacctttgaggacgtgcccttccatagcagctacgctcacagccagagtttggaccggctgatgaatcctctgatcgaccagtatctgtattatctgaacaggacacaatcaaatagtggaactcttcagcagtctaggctactgtttagccaagctggacccaccagcatgtcccttcaagctaaaaactggctgcctggaccttgctacagacagcagcgtctgtcaaagcaggcaaacgacaacaacaacagcaactttccctggactgcggctacaaagtatcatctaaatggtcgggactcgttggttaatccaggaccagctatggccagccacaaagacgatgaagaaaagtttttccccatgcatggaaccctgatatttggtaaacaaggaacaaatgctaacgacacggatttggaacatgtcatgattacagatgaagaagaaatcaggaccaccaatcccgtggctacagagcagtacggaaacgtgtcaaataatttgcaaaactcaaatactggtccaactacagaaaatgtcaatcaccagggagcgttacctggtatggtgtggcaggatcgagacgtgtacctgcagggacccatttgggccaagattcctcacaccgacggacactttcacccttctccactgatgggaggttttggactcaaacacccgcctcctcaaatcatgatcaaaaacactcctgttccagccaatcctcctacaaacttcagcgcggcaaagtttgcttccttcatcacacagtattccacgggacaggtcagcgtggagatcgagtgggagctgcagaaggagaacagcaaacgctggaaccccgagatccagtacacttccaactacaacaaatctgttaatgtggactttactgtggacgctaatggtgtgtattcagagcctcgccccattggcaccagatacctgactcgtaatctgtaa

SEQ ID NO: 3718 - DNA, 2208 bp, Artificial Sequence
  source: /note="Description of Artificial Sequence: Synthetic polynucleotide"
atggctgccgatggttatcttccagattggctcgaggacattctctctgaaggaataagacagtggtggaagctcaaacctggcccaccaccaccaaagcccgcagagcggcataaggacgacagcaggggtcttgtgcttcctgggtacaagtacctcggacccttcaacggactcgacaaaggagagccggtcaacgaggcagacgccgcggccctcgagcacgacaaggcctacgaccggcagctcgacagcggagacaacccgtacctcaagtacaaccacgccgacgcggagtttcaggagcgtcttaaagaagatacgtcttttgggggcaacctcggacgagcagtcttccaggcaaaaaagagggttcttgaacctctgggcctggttgaggaacctgttaagacggctccgggaaaaaagaggccggtagagcaatctcctgcggagccagactcctcctcgggaaccggaaaggcgggcaaccagcctgcaagaaagagattgaattttggtcagactggagacgcagactccgtacctgacccccagcctctcggacagccaccagcagccccctctggtctgggatctactacaatggctacaggcagtggcgcaccaatggcagacaataacgagggtgccgatggggtgggtaattcctcaggaaattggcattgcgattcccaatggttgggcgacagagtcatcaccaccagcacccgaacctgggccctgcccacctacaacaatcacctctacaagcaaatctccagccaatcaggagcagcgaacgacaaccactactttggctacagcaccccctgggggtattttgacttcaacagattccactgccacttttcaccacgtgactggcaaagactcatcaacaacaactggggattccgacccaaaagactcaacttcaagctctttagcattcaagtcaaagaggtcacgcagaatgacggtacgacgacgattgccaataaccttaccagcacggttcaggtgtttactgactcggagtaccagctcccgtacgtcctcggctcggcgcatcaaggatgcctcccgccgtttccagcggacgtcttcatggtcccacagtatggatacctcaccctgaacaacgggagtcaggcggtaggacgctcttccttttactgcctggagtactttccttctcagatgcttcgtaccggaaacaactttaccttcagttacacctttgaagacgttcctttccacagcagctacgctcacagtcaaagtctggaccggctgatgaatcctctgatagaccagtacctgtattatctaaacaaaacacaatcaaatagtggaactcttcagcagtctcggctactgtttagtcaagctggacccaccagcatgtctcttcaagctaaaaactggctgcctggaccttgctacagacaacagcgtctgtcaaagcaggcaaacgacaacaacaacagcaactttccctggactgcggctacaaagtatcatctaaatggccgggactcgttggttaatccaggaccagctatggccagccacaaagacgatgaagaaaagtttttccccatgcatggaaccctgatatttggtaaacaaggaacaaatgctaacgacgcggatttggacaatgtcatgattacagatgaagaagaaatccgcaccaccaatcccgtggctacggagcagtacgggactgtgtcaaataatttgcaaaactcaaatactggtccaactactggaactgtcaatcaccaaggagcgttacctggtatggtgtggcaggatcgagacgtgtaccttcagggacccatttgggccaagattcctcacaccgatggacactttcatccttctccactgatgggaggttttggactcaaacacccgcctcctcagatcatgatcaaaaacactcccgttccagccaatcctcctacaaacttcagttctgccaagtttgcttctttcatcacacagtattccacggggcaggtcagcgtggagatagagtgggagctgcagaaggagaacagcaaacgctggaaccccgagatccagtatacttccaactacaacaagtctgttaatgtggactttactgtggacactaatggtgtgtattcagagcctcgccccattggcaccagatacctgactcgtaatctgtaa

SEQ ID NO: 3719 - DNA, 2208 bp, Artificial Sequence
  source: /note="Description of Artificial Sequence: Synthetic polynucleotide"
atggctgccgatggttatcttccagattggctcgaggacactctctctgaaggaataagacagtggtggaagctcaaacctggcccaccaccaccaaggcccgcagagcggcatcaggacgacagcaggggtcttgtgcttcctgggtacaagtacctcggacccttcaacggactcgacaaaggagagccggtcaacgaggcagacgctgcggccctcgagcacgacaaggcctacgaccggcagctcgacagcggagacaacccgtacctcaagtacaaccacgccgacgcggagtttcaggagcgtcttaaagaagatacgtcttttgggggcaacctcggacgagcagtcttccaggcgaaaaagagggttcttgagcctctgggcctggttgaggaacctgttaagacggctccgggaaaaaagaggccggtagagcactctcctgcggagccagactcctcctcgggaaccggaaaagcgggccagcagcctgcaagaaagagattgaatttcggtcagactggagacgcagactccgtacctgacccccagcctctcggacagccaccagcagcccccacaagtttgggatctactacaatggctacaggcagtggcgcaccaatggcagacaataacgagggtgccgatggagtgggtaattcctcaggaaattggcattgcgattcccaatggctgggcgacagagtcatcaccaccagcacccgaacctgggccctgcccacctacaacaaccacctctacaagcaaatctccagccaatcaggagcatcgaacgacaaccactaccttggctacagcaccccttgggggtattttgacttcaacagattccactgtcacttctccccacgtgactggcaaagactcatcaacaacaactggggattccgacccaagagactcaacttcaagctctttaacattcaagtcaaagaggtcacgcagaatgacggtacgacgacgattgccaataaccttaccagcacggttcaggtgtttactgactcggagtaccagctcccgtacgtcctcggctcggcgcatcaaggatgcctcccgccgtttccagcggacgtcttcatggtcccacagtatggatacctcaccctgaacaacgggagtcaggcggtaggacgctcttccttttactgcctggagtactttccttctcagatgctgcgtaccggaaacaactttaccttcagctacacctttgaggacgtgcccttccacagcagctacgctcacagccagagtttggaccggctgatgaatcctctgatcgaccagtatctgtattatctgaacaggacacaatcaaatagtggaactcttcagcagtctaggctactgtttagccaagctgcacccaccagcatgtcccttcaagctaaaaactggctgcctggaccttgctacagacagcagcgtctgtcaaagcaggcaaacgacaacaacaacagcaactttccctggactgcggctacaaagtatcctctaaatggtcgggactcgttggttaatccaggaccagctatggccagccacaaagacgatgaagaaaagtttttccccatgcatggaaccctgatatttggtaaacaaggaacaaatgctaacgacacggatttggaacatgtcatgattacagatgaagaagaaatcaggaccaccaatcccgtggctacagagcagtacggaaacgtgtcaaataatttgcaaaactcaaatactggtccaactacagaaaatgtcaatcaccagggagcgttacctggtatggtgtggcaggatcgagacgtgtacctgcagggacccatttgggccaagattcctcacaccgacggacactttcacccttctccactgatgggaggttttggactcaaacacccgcctcctcaaatcatgatcaaaaacactcctgttccagccaatcctcctacaaacttcagcgcggcaaagtttgcttccttcatcacacagtattccacgggacaggtcagcgtggagatcgagtgggagctgcagaaggagaacagcaaacgctggaaccccgagatccagtacacttccaactacaacaaatctgttaatgtggactttactgtggacgctaatggtgtgtattcagagcctcgccccattggcaccagatacctgactcgtaatctgtaa

SEQ ID NO: 3720 - DNA, 2208 bp, Artificial Sequence
  source: /note="Description of Artificial Sequence: Synthetic polynucleotide"
atggctgccgatggttatcttccagattggctcgaggacattctctctgaaggaataagacagtggtggaagctcaaacctggcccaccaccaccaaagcccgcagagcggcataaggacgacagcaggggtcttgtgcttcctgggtacaagtacctcggacccttcaacggactcgacaaaggagagccggtcaacgaggcagacgccgcggccctcgagcacgacaaggcctacgaccggcagctcgacagcggagacaacccgtacctcaagtacaaccacgccgacgcggagtttcaggagcgtcttaaagaagatacgtcttttgggggcaacctcggacgagcagtcttccaggcaaaaaagagggttcttgaacctctgggcctggttgaggaacctgttaagacggctccgggaaaaaagaggccggtagagcaatctcctgcggagccagactcctcctcgggaaccggaaaggcgggcaaccagcctgcaagaaagagattgaattttggtcagactggagacgcagactccgtacctgacccccagcctctcggacagccaccagcagccccctctggtctgggatctactacaatggctacaggcagtggcgcaccaatggcagacaataacgagggtgccgatggagtgggtaattcctcaggaaattggcattgcgattcccaatggttgggcgacagagtcatcaccaccagcacccgaacctgggccctgcccacctacaacaatcacctctacaagcaaatctccagccaatcaggagcagcgaacgacaaccactactttggctacagcaccccctgggggtattttgacttcaacagattccactgccacttttcaccacgtgactggcaaagactcatcaacaacaactggggattccgacccaaaagactcaacttcaagctctttaacattcaagtcaaagaggtcacgcagaatgacggtacgacgacgattgccaataaccttaccagcacggttcaggtgtttactgactcggagtaccagctcccgtacgtcctcggctcggcgcatcaaggatgcctcccgccgtttccagcggacgtcttcatggtcccacagtatggatacctcaccctgaacaacgggagtcaggcggtaggacgctcttccttttactgcctggagtactttccttctcagatgcttcgtaccggaaacaactttaccttcagttacgcctttgaagacgttcctttccacagcagctacgctcacagtcaaagtctggaccggctgatgaatcctctgatagaccagtacctgtattatctaaacaaaacacaatcaaatagtggaactcttcagcagtctcggctactgtttagtcaagctggacccaccagcatgtctcttcaagctaaaaactggctgcctggaccttgctacagacaacagcgtctgtcaaagcaggcaaacgacaacaacaacagcaactttccctggactgcggctacaaagtatcatctaaatggccgggactcgttggttaatccaggaccagctatggccagccacaaagacgatgaagaaaagtttttccccatgcatggaaccctgatatttggtaaacaaggaacaaatgctaacgacgcggatttggacaatgtcatgattacagatgaagaagaaatccgcaccaccaatcccgtggctacggagcagtacgggactgtgtcaaataatttgcaaaactcaaatactggtccaactactggaactgtcaatcaccaaggagcgttacctggtatggtgtggcaggatcgagacgtgtaccttcagggacccatttgggccaagattcctcacaccgatggacactttcatccttctccactgatgggaggttttggactcaaacacccgcctcctcagatcatgatcaaaaacactcccgttccagccaatcctcctacaaacttcagttctgccaagtttgctcctttcatcacacagtattccacggggcaggtcagcgtggagatagagtgggagctgcagaaggagaacagcaaacgctggaaccccgagatccagtatacttccaactacaacaagtctgttaatgtggactttactgtggacactaatggtgtgtattcagagcctcgccccattggcaccagatacctgactcgtaatctgtaa

SEQ ID NO: 3721 - DNA, 2208 bp, Artificial Sequence
  source: /note="Description of Artificial Sequence: Synthetic polynucleotide"
atggctgccgatggttatcttccagattggctcgaggacactctctctgaaggaataagacagtggtggaagctcaaacctggcccaccaccaccaaggcccgcagagcggcatcaggacgacagcaggggtcttgtgcttcctgggtacaagtacctcggacccttcaacggactcgacaaaggagagccggtcaacgaggcagacgctgcggccctcgagcacgacaaggcctacgaccggcagctcgacagcggagacaacccgtacctcaagtacaaccacgccgacgcggagtttcaggagcgtcttaaagaagatacgtcttttgggggcaacctcggacgagcagtcttccaggcgaaaaagagggttcttgaacctctgggcctggttgaggaacctgttaagacggctccgggaaaaaagaggccggtagagcactctcctgcggagccagactcctcctcgggaaccggaaaagcgggccagcagcctgcaagaaagagattgaatttcggtcagactggagacgcagactccgtacctgacccccagcctctcggacagccaccagcagcccccacaagtttgggatctactacaatggctacaggcagtggcgcaccaatggcagacaataacgagggtgccgatggagtgggtaattcctcaggaaattggcattgcgattcccaatggctgggcgacagagtcatcaccaccagcacccgaacctgggccctgcccacctacaacaaccacctctacaagcaaatctccagccaatcaggagcatcgaacgacaaccactactttggctacagcaccccttgggggtattttgacttcaacagattccactgtcacttctccccacgtgactggcaaagactcatcaacaacaactggggattccgacccaagagactcaacttcaagctctttaacattcaagtcaaagaggtcacgcagaatgacggtacgacgacgattgccaataaccttaccagcacggttcaggtgtttactgactcggagtaccagctcccgtacgtcctcggctcggcgcatcaaggatgcctcccgccgtttccagcggacgtcttcatggtcccacagtatggatacctcaccctgaacaacgggagtcaggcggtaggacgctcttccttttactgcctggagtactttccttctcagatgctgcgtaccggaaacaactttaccttcagctacacctttgaggacgtgcccttccacagcagctacgctcacagccagagtttggaccggctgatgaatcctctgatcgaccagtatctgtattatctgaacaggacacaatcaaatagtggaactcttcagcagtctaggctactgtttagccaagctggacccaccagcatgtcccttcaagctaaaaactggctgcctggaccttgctacagacagcagcgtctgtcaaagcaggcaaacgacaacaacaacagcaactttccctggactgcggctacaaagtatcatctaaatggtcgggactcgttggttaatccaggaccagctatggccagccacaaagacgatgaagaaaagtttttccccatgcatggaaccctgatatttggtaaacaaggaacaaatgctaacgacgcggatttggaacatgtcatgattacagatgaagaagaaatcaggaccaccaatcccgtggctacagagcagtacggaaacgtgtcaaataatttgcaaaactcaaatactggtccaactacagaaaatgtcaatcaccagggagcgttacctggtatggtgtggcaggatcgagacgtgtacctgcagggacccatttgggccaagattcctcacaccgacggacactttcacccttctccactgatgggaggttttggactcaaacacccgcctcctcaaatcatgatcaaaaacactcctgttccagccaatcctcctacaaacttcagcgcggcaaagtttgcttccttcatcacacggtattccacgggacaggtcagcgtggagatcgagtgggagctgcagaaggagaacagcaaacgctggaaccccgagatccagtacacttccaactacaacaaatctgttaatgtggactttactgtggacgctaatggtgtgtattcagagcctcgccccattggcaccagatacctgactcgtaatctgtaa

SEQ ID NO: 3722 - DNA, 2208 bp, Artificial Sequence
  source: /note="Description of Artificial Sequence: Synthetic polynucleotide"
atggctgccgatggttatcttccagattggctcgaggacactctctctgaaggaataagacagtggtggaagctcaaacctggcccaccaccaccaaggcccgcagagcggcatcaggacgacagcaggggtcttgtgcttcctgggtacaagtacctcggacccttcaacggactcgacaaaggagagccggtcaacgaggcagacgctgcggccctcgagcacgacaaggcctacgaccggcagctcgacagcggagacaacccgtacctcaagtacaaccgcgccgacgcggagtttcaggagcgtcttaaagaagatacgtcttttgggggcaacctcggacgagcagtcttccaggcgaaaaagagggttcttgaacctctgggcctggttgaggaacctgttaagacggctccgggaaaaaagaggccggtagagcactctcctgcggagccagactcctcctcgggaaccggaaaagcgggccagcagcctgcaagaaagagattgaatttcggtcagactggagacgcagactccgtacctgacccccagcctctcggacagccaccagcagcccccacaagtttgggatctactacaatggctacaggcagtggcgcaccaatggcagacaataacgagggtgccgatggagtgggtaattcctcaggaaattggcattgcgattcccaatggctgggcgacagagtcatcaccaccagcacccgaacctgggccctgcccacctacaacaaccacctctacaagcaaatctccagccaatcaggagcatcgaacgacaaccactactttggctacagcaccccttgggggtattttgacttcaacagattccactgtcacttctccccacgtgactggcaaagactcatcaacaacaactggggattccgacccaagagactcaacttcaagctctttaacattcaagtcaaagaggtcacgcagaatgacggtacgacgacgattgccaataaccttaccagcacggttcaggtgtttactgactcggagtaccagctcccgtacgtcctcggctcggcgcatcaaggatgcctcccgccgtttccagcggacgtcttcatggtcccacagtatggatacctcaccctgaacaacgggagtcaggcggtaggacgctcttccttttactgcctggagtactttccttctcagatgctgcgtaccggaaacaactttaccttcagctacacctttgaggacgtgcccttccacagcagctacgctcacagccagagtttggaccggctgatgaatcctctgatcgaccagtatctgtattatctgaacaggacacaatcaaatagtggaactcttcagcagtctaggctactgtttagccaagctggacccaccagcatgtcccttcaagctaaaaactggctgcctggaccttgctacagacagcagcgtctgtcaaagcaggcaaacgacaacaacaacagcaactttccctggactgcggctacaaagtatcatctaaatggtcgggactcgttggttaatccaggaccagctatggccagccacaaagacgatgaagaaaagtttttccccatgcatggaaccctgatatttggtaaacaaggaacaaatgctaacgacacggatttggaacatgtcatgattacagatgaagaagaaatcaggaccaccaatcccgtggctacagagcagtacggaaacgtgtcaaataatttgcaaaactcaaatactggtccaactacagaaaatgtcaatcaccagggagcgttacctggtatggtgtggcaggatcgagacgtgtacctgcagggacccatttgggccaagattcctcacaccgacggacactttcacccttctccactgatgggaggttttggactcaaacacccgcctcctcaaatcatgatcaaaaacactcctgttccagccaatcctcctacaaacttcagcgcggcaaagtttgcttccttcatcacacagtattccacgggacaggtcagcgtggagatcgagtgggagctgcagaaggagaacagcaaacgctggaaccccgagatccagtacacttccaactacaacaaatctgttaatgtggactttactgtggacgctaatggtgtgtattcagagcctcgccccattggcaccagatacctgactcgtaatctgtaa

SEQ ID NO: 3723 - DNA, 2208 bp, Artificial Sequence
  source: /note="Description of Artificial Sequence: Synthetic polynucleotide"
atggctgccgatggttatcttccagattggctcgaggacactctctctgaaggaataagacagtggtggaagctcaaacctggcccaccaccaccaaggcccgcagagcggcatcaggacgacagcaggggtcttgtgcttcctgggtacaagtacctcggacccttcaacggactcgacaaaggagagccggtcaacgaggcagacgctgcggccctcgagcacgacaaggcctacgaccggcagctcgacagcggagacaacccgtacctcaagtacaaccacgccgacgcggagtttcaggagcgtcttaaagaagatacgtcttttgggggcaacctcggacgagcagtcttccaggcgaaaaagagggttcttgaacctctgggcctggttgaggaacctgttaagacggctccgggaaaaaagaggccggtagagcactctcctgcggagccagactcctcctcgggaaccggaaaagcgggccagcagcctgcaagaaagagattgaatttcggtcagactggagacgcagactccgtacctgacccccagcctctcggacagccaccagcagcccccacaagtttgggatctactacaatggctacaggcagtggcgcaccaatggcagacaataacgagggtgccgatggagtgggtaattcctcaggaaattggcattgcgattcccaatggctgggcgacagagtcatcaccaccagcacccgaacctgggccctgcccacctacaacaaccacctctacaagcaaatctccagccaatcaggagcatcgaacgacaaccactactttggctacagcaccccttgggggtattttgacttcaacagattccactgtcacttctccccacgtgactggcaaagactcatcaacaacaactggggattccgacccaagagactcaacttcaagctctttaacattcaagtcaaagaggtcacgcagaatgacggtacgacgacgattgccaataaccttaccagcacggttcaggtgtttactgactcggagtaccagctcccgtacgtcctcggctcggcgcatcaaggatgcctcccgccgtttccagcggacgtcttcatggtcccacagtatggatacctcaccctgaacaacgggagtcaggcggtaggacgctcttccttttactgcctggagtactttccttctcagatgctgcgtaccggaaacaactttaccttcagctacacctttgaggacgtgcccttccacagcagctacgctcacagccagagtttggaccggctgatgaatcctctgatcgaccagtatctgtattatctgaacaggacacaatcaaatagtggaactcttcagcagtctaggctactgtttagccaagctggacccaccagcatgtcccttcaagctaaaaactggctgcctggaccttgctacagacagcagcgtctgtcaaagcaggcaaacgacaacaacaacagcaactttccctggactgcggctacaaagtatcatctaaatggtcgggactcgttggttaatccaggaccagctatggccagccacaaagacgatgaagaaaagtttttccccatgcatggaaccctgatatttggtaaacaaggaacaaatgctaacgacgcggatttggaacatgtcatgattacagatgaagaagaaatcaggaccaccaatcccgtggctacagagcagtacggaaacgtgtcaaataatttgcaaaactcaaatactggtccaactacagaaaatgtcaatcaccagggagcgttacctggtatggtgtggcaggatcgagacgtgtacctgcagggacccatttgggccaagattcctcacaccgacggacacyttcacccttctccactgatgggaggttttggactcaaacacccgcctcctcaaatcatgatcaaaaacactcctgttccagccaatcctcctacaaacttcagcgcggcaaagtttgcttccttcatcacacagtattccacgggacaggtcagcgtggagatcgagtgggagctgcagaaggagaacagcaaacgctggaaccccgagatccagtacacttccaactacaacaaatctgttaatgtggactttactgtggacgctaatggtgtgtattcagagcctcgccccattggcaccagatacctgactcgtaatctgtaa

SEQ ID NO: 3724 - DNA, 2208 bp, Artificial Sequence
  source: /note="Description of Artificial Sequence: Synthetic polynucleotide"
atggctgccgatggttatcttccagattggctcgaggacactctctctgaaggaataagacagtggtggaagctcaaacctggcccaccaccaccaaggcccgcagagcggcatcaggacgacagcaggggtcttgtgcttcctgggtacaagtacctcggacccttcaacggactcgacaaaggagagccggtcaacgaggcagacgctgcggccctcgagcacgacaaggcctacgaccggcagctcgacagcggagacaacccgtacctcaagtacaaccacgccgacgcggagtttcaggagcgtcttaaagaagatacgtcttttgggggcaacctcggacgagcagtcttccaggcgaaaaagagggttcttgaacctctgggcctggttgaggaacctgttaagacggctccgggaaaaaagaggccggcagagcactctcctgcggagccagactcctcctcgggaaccggaaaagcgggccagcagcctgcaagaaagagattgaatttcggtcagactggagacgcagactccgtacctgacccccagcctctcggacagccaccagcagcccccacaagtttgggatctactacaatggctacaggcagtggcgcaccaatggcagacaataacgagggtgccgatggagtgggtaattcctcaggaaattggcattgcgattcccaatggctgggcgacagagtcatcaccaccagcacccgaacctgggccctgcccacctacaacaaccacctctacaagcaaatctccagccaatcaggagcatcgaacgacaaccactactttggctacagcaccccttgggggtattttgacttcaacagattccactgtcacttctccccacgtgactggcaaagactcatcaacaacaactggggattccgacccaagagactcaacttcaagctctttaacattcaagtcaaagaggtcacgcagaatgacggtacgacgacgattgccaataaccttaccagcacggttcaggtgtttactgactcggagtaccagctcccgtacgtcctcggctcggcgcatcaaggatgcctcccgccgtttccagcggacgtcttcatggtcccacagtatggatacctcaccctgaacaacgggagtcaggcggtaggacgctcttccttttactgcctggagtactttccttctcagatgctgcgtaccggaaacaactttaccttcagctacacctttgaggacgtgcccttccacagcagctacgctcacagccagagtttggaccggctgatgaatcctctgatcgaccagtatctgtattatctgaacaggacacaatcaaatagtggaactcttcagcagtctaggctactgtttagccaagctggacccaccagcatgtcccttcaagctaaaaactggctgcctggaccttgctacagacagcagcgtctgtcaaagcaggcaaacgacaacaacaacagcaactttccctggactgcggctacaaagtatcatctaaatggtcgggactcgttggttaatccaggaccagctatggccagccacaaagacgatgaagaaaagtttttccccatgcatggaaccctgatatttggtaaacaaggaacaaatgctaacgacgcggatttggaacatgtcatgattacagatgaagaagaaatcaggaccaccaatcccgtggctacagagcagtacggaaacgtgtcaaataatttgcaaaactcaaatactggtccaactacagaaaatgtcaatcaccagggagcgttacctggtatggtgtggcaggatcgagacgtgtacctgcagggacccatttgggccaagattcctcacaccgacggacactttcacccttctccactgatgggaggttttggactcaaacacccgcctcctcaaatcatgatcaaaaacactcctgttccagccaatcctcctacaaacttcagcgcggcaaagtttgcttccttcatcacacagtattccacgggacaggtcagcgtggagatcgagtgggagctgcagaaggagaacagcaaacgctggaaccccgagatccagtacacttccaactacaacaaatctgttaatgtggactttactgtggacgctaatggtgtgtattcagagcctcgccccattggcaccagatacctgactcgtaatctgtaa

SEQ ID NO: 3725 - DNA, 2208 bp, Artificial Sequence
  source: /note="Description of Artificial Sequence: Synthetic polynucleotide"
atggctgccgatggttatcttccagattggctcgaggacactctctctgaaggaataagacagtggtggaagctcaaacctggcccaccaccaccaaggcccgcagagcggcatcaggacgacagcaggggtcttgtgcttcctgggtacaagtacctcggacccttcaacggactcgacaaaggagagccggtcaacgaggcagacgctgcggccctcgagcacgacaaggcctacgaccggcagctcgacagcggagacaacccgtacctcaagtacaaccacgccgacgcggagtttcaggagcgtcttaaagaagatacgtcttttgggggcaacctcggacgagcagtcttccaggcgaaaaagagggttcttgaacctctgggcctggttgaggaacctgttaagacggctccgggaaaaaagaggccggtagagcactctcctgcggagccagactcctcctcgggaaccggaaaagcgggccagcagcctgcaagaaagagattgaatttcggtcagactggagacgcagactccgtacctgacccccagcctctcggacagccaccagcagcccccacaagtttgggatctactacaatggctacaggcagtggcgcaccaatggcagacaataacgagggtgccgatggagtgggtaattcctcaggaaattggcattgcgattcccaatggctgggcgacagagtcatcaccaccagcacccgaacctgggccctgcccacctacaacaaccacctctacaagcaaatctccagccaatcaggagcatcgaacgacaaccactactttggctacagcaccccttgggggtattttgacttcaacagattccactgtcacttctccccacgtgactggcaaagactcatcaacaacaactggggattccgacccaagagactcaacttcaagctctttaacattcaagtcaaagaggtcacgcagaatgacggtacgacgacgattgccaataaccttaccagcacggttcaggtgtttactgactcggagtaccagctcccgtacgtcctcggctcggcgcatcaaggatgcctcccgccgtttccagcggacgtcttcatggtcccacagtatggatacctcaccctgaacaacgggagtcaggcggtaggacgctcttccttttactgcctggagtactttccttctcagatgctgcgtaccggaaacaactttaccttcagctacacctttgaggacgtgcccttccacagcagctacgctcacagccagagtttggaccggctgatgaatcctctgatcgaccagtatctgtattatctgaacaggacacaatcaaatagtggaactcttcagcagcctaggctactgtttagccaagctggacccaccagcatgtcccttcaagctaaaaactggctgcctggaccttgctacagacagcagcgtctgtcaaagcaggcaaacgacaacaacaacagcaactttccctggactgcggctacaaagtatcatctaaatggtcgggactcgttggttaatccaggaccagctatggccagccacaaagacgatgaagaaaagtttttccccatgcatggaaccctgatatttggtaaacaaggaacaaatgctaacgacgcggatttggaacatgtcatgattacagatgaagaagaaatcaggaccaccaatcccgtggctacagagcagtacggaaacgtgtcaaataatttgcaaaactcaaatactggtccgactacagaaaatgtcaatcaccagggagcgttacctggtatggtgtggcaggatcgagacgtgtacctgcagggacccatttgggccaagattcctcacaccgacggacactttcacccttctccactgatgggaggttttggactcaaacacccgcctcctcaaatcatgatcaaaaacactcctgttccagccaatcctcctacaaacttcagcgcggcaaagtttgcttccttcatcacacagtattccacgggacaggtcagcgtggagatcgagtgggagctgcagaaggagaacagcaaacgctggaaccccgagatccagtacacttccaactacaacaaatctgttaatgtggactttactgtggacgctaatggtgtgtattcagagcctcgccccattggcaccagatacctgactcgtaatctgtaa

SEQ ID NO: 3726 - DNA, 2208 bp, Artificial Sequence
  source: /note="Description of Artificial Sequence: Synthetic polynucleotide"
atggctgccgatggttatcttccagattggctcgaggacactctctctgaaggaataagacagtggtggaagctcaaacctggcccaccaccaccaaggcccgcagagcggcatcaggacgacagcaggggtcttgtgcttcctgggtacaagtacctcggacccttcaacggactcgacaaaggagagccggtcaacgaggcagacgctgcggccctcgagcacgacaaggcctacgaccggcagctcgacagcggagacaacccgtacctcaagtacaaccacgccgacgcggagtttcaggagcgtcttaaagaagatacgtcttttgggggcaacctcggacgagcagtcttccaggcgaaaaagagggttcttgaacctctgggcctggttgaggaacctgttaagacggctccgggaaaaaagaggccggtagagcactctcctgcggagccagactcctcctcgggaaccggaaaagcgggccagcagcctgcaagaaagagattgaatttcggtcagactggagacgcagactccgtacctgacccccagcctctcggacagccaccagcagcccccacaagtttgggatctactacaatggctacaggcagtggcgcaccaatggcagacaataacgagggtgccgatggagtgggtaattcctcaggaaattggcattgcgattcccaatggctgggcgacagagtcatcaccaccagcacccgaacctgggccctgcccacctacaacaaccacctctacaagcaaatctccagccaatcaggagcatcgaacgacaaccactactttggctacagcaccccttgggggtattttgacttcaacagattccactgtcacttctccccacgtgactggcaaagactcatcaacaacaactggggattccgacccaagagactcaacttcaagctctttaacattcaagtcaaagaggtcacgcagaatgacggtacgacgacgattgccaataaccttaccagcacggttcaggtgtttactgactcggagtaccagctcccgtacgtcctcggctcggcgcatcaaggatgcctcccgccgtttccagcggacgtcttcatggtcccacagtatggatacctcaccctgaacaacgggagtcaggcggtaggacgctcttccttttactgcctggagtactttccttctcagatgctgcgtaccggaaacaactttaccttcagctacacctttgaggacgtgcccttccacagcagctacgctcacagccagagtttggaccggctgatgaatcctctgatcgaccagtatctgtattatctgaacaggacacaatcaaatagtggaactcttcagcagtctaggctactgtttagccaagctggacccaccagcatgtcccttcaagctaaaaactggctgcctggaccttgctacagacagcagcgtctgtcaaagcaggcaaacgacaacaacaacagcaactttccctggactgcggctacaaagtatcatctaaatggtcgggactcgttggttaatccaggaccagctatggccagccacaaagacgatgaagaaaagtttttccccatgcatggaaccctgatatttggtaaacaaggaacaaatgctaacgacrcggatttggaacatgtcatgattacagatgaagaagaaatcaggaccaccaatcccgtggctacagagcagtacggaaacgtgtcaaataatttgcaaaactcaaatactggtccaactacagaaaatgtcaatcaccagggagcgttacctggtatggtgtggcaggatcgagacgtgtacctgcagggacccatttgggccaagattcctcacaccgacggacactttcacccttctccactgatgggaggttttggactcaaacacccgcctcctcaaatcatgatcaaaaacactcctgttccagccaatcctcctacaaacttcagcgcggcaaagtttgcttccttcatcacacagtattccacgggacaggtcagcgtggagatcgagtgggagctgcagaaggagaacagcaaacgctggaaccccgagacccagtacacttccaactacaacaaatctgttaatgtggactttactgtggacgctaatggtgtgtattcagagcctcgccccattggcaccagatacctgactcgtaatctgtaa

SEQ ID NO: 3727 - DNA, 2208 bp, Artificial Sequence
  source: /note="Description of Artificial Sequence: Synthetic polynucleotide"
atggctgccgatggttatcttccagattggctcgaggacactctctctgaaggaataagacagtggtggaagctcaaacctggcccaccactaccaaggcccgcagagcggcatcaggacgacagcaggggtcttgtgcttcctgggtacaagtacctcggacccttcaacggactcgacaaaggagagccggtcaacgaggcagacgctgcggccctcgagcacgacaaggcctacgaccggcagctcgacagcggagacaacccgtacctcaagtacaaccacgccgacgcggagtttcaggagcgtcttaaagaagatacgtcttttgggggcaacctcggacgagcagtcttccaggcgaaaaagagggttcttgaacctctgggcctggttgaggaacctgttaagacggctccgggaaaaaagaggccggtagagcactctcctgcggagccagactcctcctcgggaaccggaaaagcgggccagcagcctgcaagaaagagattgaatttcggtcagactggagacgcagactccgtacctgacccccagcctctcggacagccaccagcagcccccacaagtttgggatctactacaatggctacaggcagtggcgcaccaatggcagacaataacgagggtgccgatggagtgggtaattcctcaggaaattggcattgcgattcccaatggctgggcgacagagtcatcaccaccagcacccgaacctgggccctgcccacctacaacaaccacctctacaagcaaatctccagccaatcaggagcatcgaacgacaaccactactttggctacagcaccccttgggggtattttgacttcaacagattccactgtcacttctccccacgtgactggcaaagactcatcaacaacaactggggattccgacccaagagactcaacttcaagctctttaacattcaagtcaaagaggtcacgcagaatgacggtacgacgacgattgccaataaccttaccagcacggttcaggtgtttactgactcggagtaccggctcccgtacgtcctcggctcggcgcatcaaggatgcctcccgccgtttccagcggacgtcttcatggtcccacagtatggatacctcaccctgaacaacgggagtcaggcggtaggacgctcttccttttactgcctggagtactttccttctcagatgctgcgtaccggaaacaactttaccttcagctacacctttgaggacgtgcccttccacagcagctacgctcacagccagagtttggaccggctgatgaatcctctgatcgaccagtatctgtattatctgaacaggacacaatcaaatagtggaactcttcagcagtctaggctactgtttagccaagctggacccaccagcatgtcccttcaagctaaaaactggctgcctggaccttgctacagacagcagcgtctgtcaaagcaggcaaacgacaacaacaacagcaactttccctggactgcggctacaaagtatcatctaaatggtcgggactcgttggttaatccgggaccagctatggccagccacaaagacgatgaagaaaagtttttccccatgcatggaaccctgatatttggtaaacaaggaacaaatgctaacgacgcggatttggaacatgtcatgattacagatgaagaagaaatcaggaccaccaatcccgtggctacagagcagtacggaaacgtgtcaaataatttgcaaaactcaaatactggtccaactacagaaaatgtcaatcaccagggagcgttacctggtatggtgtggcaggatcgagacgtgtacctgcagggacccatttgggccaagattcctcacaccgacggacactttcacccttctccactgatgggaggttttggactcaaacacccgcctcctcaaatcatgatcaaaaacactcctgttccagccaatcctcctacaaacttcagcgcggcaaagtttgcttccttcatcacacagtattccacgggacaggtcagcgtggagatcgagtgggagctgcagaaggagaacagcaaacgctggaaccccgagatccagtacacttccaactacaacaaatctgttaatgtggactttactgtggacgctaatggtgtgtattcagagcctcgccccattggcaccagatacctgactcgtaatctgtaa

SEQ ID NO: 3728 - DNA, 2208 bp, Artificial Sequence
  source: /note="Description of Artificial Sequence: Synthetic polynucleotide"
atggctgccgatggttatcttccagattggctcgaggacactctctctgaaggaataagacagtggtggaagctcaaacctggcccaccaccaccaaggcccgcagagcggcatcaggacgacagcaggggtcttgtgcttcctgggtacaagtacctcggacccttcaacggactcgacaaaggagagccggtcaacgaggcagacgctgcggccctcgagcacgacaaggcctacgaccggcagctcgacagcggagacaacccgtacctcaagtacaaccacgccgacgcggagtttcaggagcgtcttaaagaagatacgtcttttgggggcaacctcggacgagcagtcttccaggcgaaaaagagggttcttgaacctctgggcctggttgaggaacctgttaagacggctccgggaaaaaagaggccggtagagcactctcctgcggagccagactcctcctcgggaaccggaaaagcgggccagcagcctgcaagaaagagattgaatttcggtcagactggagacgcagactccgtacctgacccccagcctctcggacagccaccagcagcccccacaagtttgggatctactacaatggctacaggcagtggcgcaccaatggcagacaataacgagggtgccgatggagtgggtaattcctcaggaaattggcattgcgattcccaatggctgggcgacagagtcatcaccaccagcacccgaacctgggccctgcccacctacaacaaccacctctacaagcaaatctccagccaatcaggagcatcgaacgacaaccactactttggctacagcaccccttgggggtattttgacttcaacagattccactgtcacttctccccacgtgactggcaaagactcatcaacaacaactggggattccgacccaagagactcaacttcaagctctttaacattcaagtcaaagaggtcacgcagaatgacggtacgacgacgattgccaataaccttaccagcacggttcaggtgtttactgactcggagtaccagctcccgtacgtcctcggctcggcgcatcaaggatgcctcccgccgtttccagcggacgtcttcatggtcccacagtatggatacctcaccctgaacaacgggagtcaggcggtaggacgctcttccttttactgcctggagtactttccttctcagatgctgcgtaccggaaacaactttaccttcagctacacctttgaggacgtgcccttccacagcagctacgctcacagccagagtttggaccggctgatgaatcctctgaccgaccagtatctgtattatctgaacaggacacaatcaaatagtggaactcttcagcagtctaggctactgtttagccaagctggacccaccagcatgtcccttcaagctaaaaactggctgcctggaccttgctacagacagcagcgtctgtcaaagcaggcaaacgacaacaacaacagcaactttccctggactgcggctacaaagtatcatctaaatggtcgggactcgttggttaatccaggaccagctatggccagccacaaagacgatgaagaaaagtttttccccatgcatggaaccctgatatttggtaaacaaggaacaaatgctaacgacacggatttggaacatgtcatgattacagatgaagaagaaatcaggaccaccaatcccgtggctacagagcagtacggaaacgtgtcaaataatttgcaaaactcaaatactggtccaactacagaaaatgtcaatcaccagggagcgttacctggtatggtgtggcaggatcgagacgtgtacctgcagggacccatttgggccaagattcctcacaccgacggacactttcacccttctccactgatgggaggttttggactcaaacacccgcctcctcaaatcatgatcaaaaacactcctgttccagccaatcctcctacaaacttcagcgcggcaaagtttgcttccttcatcacacagtattccacgggacaggtcagcgtggagatcgagtgggagctgcagaaggagaacagcaaacgctggaaccccgagatccagtacacttccaactacaacaaatctgttaatgtggactttactgtggacgctaatggtgtgtattcagagcctcgccccattggcaccagatacctgactcgtaatctgtaa

SEQ ID NO: 3729 - DNA, 2208 bp, Artificial Sequence
  source: /note="Description of Artificial Sequence: Synthetic polynucleotide"
atggctgccgatggttatcttccagattggctcgaggacactctctctgaaggaataagacagtggtggaagctcaaacctggcccaccaccaccaaggcccgcagagcggcatcaggacgacagcaggggtcttgtgcttcctgggtacaagtacctcggacccttcaacggactcgacaaaggagagccggtcaacgaggcagacgctgcggccctcgagcacgacaaggcctacgaccggcagctcgacagcggagacaacccgtacctcaagtacaaccacgccgacgcggagtttcaggagcgtcttaaagaagatacgtcttttgggggcaacctcggacgagcagtcttccaggcgaaaaagagggttcttgaacctctgggcctggttgaggaacctgttaagacggctccgggaaaaaagaggccggtagagcactctcctgcggagccagactcctcctcgggaaccggaaaagcgggccagcagcctgcaagaaagagattgaatttcggtcagactggagacgcagactccgtacctgacccccagcctctcggacagccaccagcagcccccacaagtttgggatctactacaatggctacaggcagtggcgcaccaatggcagacaataacgagggtgccgatggagtgggtaattcctcaggaaattggcattgcgattcccaatggctgggcgacagagtcatcaccaccagcacccgaacctgggccctgcccacctacaacaaccacctctacaggcaaatctccagccaatcaggagcatcgaacgacaaccactactttggctacagcaccccttgggggtattttgacttcaacagattccactgtcacttctccccacgtgactggcaaagactcatcaacaacaactggggattccgacccaagagactcaacttcaagctctttaacattcaagtcaaagaggtcacgcagaatgacggtacgacgacgattgccaataaccttaccagcacggttcaggtgtttactgactcggagtaccagctcccgtacgtcctcggctcggcgcatcaaggatgcctcccgccgtttccagcggacgtcttcatggtcccacagtatggatacctcaccctgaacaacgggagtcaggcggtaggacgctcttccttttactgcctgaagtactttccttctcagatgctgcgtaccggaaacaactttaccttcagctacacctttgaggacgtgcccttccacagcagctacgctcacagccagagtttggaccggctgatgaatcctctgatcgaccagtatctgtattatctgaacaggacacaatcaaatagtggaactcttcagcagtctaggctactgtttagccaagctggacccaccagcatgtcccttcaagctaaaaactggctgcctggaccttgctacagacagcagcgtctgtcaaagcaggcaaacgacaacaacaacagcaactttccctggactgcggctacaaagtatcatctaaatggtcgggactcgttggttaatccaggaccagctatggccagccacaaagacgatgaagaaaagtttttccccctgcatggaaccctgatatttggtaaacaaggaacaaatgctaacgacacggatttggaacatgtcatgattacagatgaagaagaaatcaggaccaccaatcccgtggctacagagcagtacggaaacgtgtcaaataatttgcaaaactcaaatactggtccaactacagaaaatgtcaatcaccagggagcgttacctggtatggtgtggcaggatcgagacgtgtacctgcagggacccatttgggccaagattcctcacaccgacggacactttcacccttctccactgatgggaggttttggactcaaacacccgcctcctcaaatcatgatcaaaaacactcctgttccagccaatcctcctacaaacttcagcgcggcaaagtttgcttccttcatcacacagtattccacgggacaggtcagcgtggagatcgagtgggagctgcagaaggagaacagcaaacgctggaaccccgagatccagtacacttccaactacaacaaatctgttaatgtggactttactgtggacgctaatggtgtgtattcagagcctcgccccattggcaccagatacctgactcgtaatctgtaa

SEQ ID NO: 3730 - DNA, 2208 bp, Artificial Sequence
  source: /note="Description of Artificial Sequence: Synthetic polynucleotide"
atggctgccgatggttatcttccagattggctcgaggacactctctctgaaggaataagacagtggtggaagctcaaacctggcccaccaccaccaaggcccgcagagcggcatcaggacgacagcaggggtcttgtgcttcctgggtacaagtacctcggacccttcaacggactcgacaaaggagagccggtcaacgaggcagacgctgcggccctcgagcacgacaaggcctacgaccggcagctcgacagcggagacaacccgtacctcaagtacaaccacgccgacgcggagtttcaggagcgtcttaaagaagatacgtcttttgggggcaacctcggacgagcagtcttccaggcgaaaaagagggttcttgaacctctgggcctggttgaggaacctgttaagacggctccgggaaaaaagaggccggtagagcactctcctgcggagccagactcctcctcgggaaccggaaaagcgggccagcagcctgcaagaaagagattgaatttcggtcagactggagacgcagactccgtacctgacccccagcctctcggacagccaccagcagcccccacaagtttgggatctactacaatggctacaggcagtggcgcaccaatggcagacaataacgagggtgccgatggagtgggtaattcctcaggaaattggcattgcgattcccaatggctgggcgacagagtcatcaccaccagcacccgaacctgggccctgcccacctacaacaaccacctctacaggcaaatctccagccaatcaggagcatcgaacgacaaccactactttggctacagcaccccttgggggtattttgacttcaacagattccactgtcacttctccccacgtgactggcaaagactcatcaacaacaactggggattccgacccaagagactcaacttcaagctctttaacattcaagtcaaagaggtcacgcagaatgacggtacgacgacgattgccaataaccttaccagcacggttcaggtgtttactgactcggagtaccagctcccgtacgtcctcggctcggcgcatcaaggatgcctcccgccgtttccagcggacgtcttcatggtcccacagtatggatacctcaccctgaacaacgggagtcaggcggtaggacgctcttccttttactgcctggagtactttccttctcagatgctgcgtaccggaaacaactttaccttcagctacacctttgaggacgtgcccttccacagcagctacgctcacagccagagtttggaccggctgatgaatcctctgatcgaccagtatctgtattatctgaacaggacacaatcaaatagtggaactcttcagcagtctaggctactgtttagccaagctggacccaccagcatgtcccttcaagctaaaaactggctgcctggaccttgctacagacagcagcgtctgtcaaagcaggcaaacgacaacaacaacagcaactttccctggactgcggctacaaagtatcatctaaatggtcgggactcgttggttaatccaggaccagctatggccagccacaaagacgatgaagaaaagtttttccccatgcatggaaccctgatatttggtaaacaaggaacaaatgctaacgacacggatttggaacatgtcatgattacagatgaagaagaaatcaggaccaccaatcccgtggctacagagcagtacggaaacgtgtcaaataatttgcaaaactcaaatactggtccaactacagaaaatgtcaatcaccagggagcgttacctggtatggtgtggcaggatcgagacgtgtacctgcagggacccatttgggccaagattcctcacaccgacggacactttcacccttctccactgatgggaggttttggactcaaacacccgcctcctcaaatcatgatcaaaaacactcctgttccagccaatcctcctacaaacttcagcgcggcaaagtttgcttccttcatcacacagtattccacgggacaggtcagcgtggagatcgagtgggtgctgcagaaggagaacagcaaacgctggaaccccgagatccagtacacttccaactacaacaaatctgttaatgtggactttactgtggacgctaatggtgtgtattcagagcctcgccccattggcaccagatacctgactcgtaatctgtaa

SEQ ID NO: 3731 - DNA, 2208 bp, Artificial Sequence
  source: /note="Description of Artificial Sequence: Synthetic polynucleotide"
atggctgccgatggttatcttccagattggctcgaggacactctctctgaaggaataagacagtggtggaagctcaaacctggcccaccaccaccaaggcccgcagagcggcatcaggacgacagcaggggtcttgtgcttcctgggtacaagtacctcggacccttcaacggactcgacaaaggagagccggtcaacgaggcagacgctgcggccctcgagcacgacaaggcctacgaccggcagctcgacagcggagacaacccgtacctcaagtacaaccacgccgacgcggagtttcaggagcgtcttaaagaagatacgtcttttgggggcaacctcggacgagcagtcttccaggcgaaaaagagggttcttgaacctctgggcctggttgaggaacctgttaagacggctccgggaaaaaagaggccggtagagcactctcctgcggagccagactcctcctcgggaaccggaaaagcgggccagcagcctgcaagaaagagattgaatttcggtcagactggagacgcagactccgtacctgacccccagcctctcggacagccaccagcagcccccacaagtttgggatctactacaatggctacaggcagtggcgcaccaatggcagacaataacgagggtgccgatggagtgggtaattcctcaggaaattggcattgcgattcccaatggctgggcgacagagtcatcaccaccagcacccgaacctgggccctgcccacctacaacaaccacctctacaagcaaatctccagccaatcaggagcatcgaacgacaaccactactttggctacagcaccccttgggggtattttgacttcaacagattccactgtcacttctccccacgtgactggcaaagactcatcaacaacaactggggattccgacccaagagactcaacttcaagctctttaacattcaagtcaaagaggtcacgcagaatgacggtacgacgacgattgccaataaccttatcagcacggttcaggtgtttactgactcggagtaccagctcccgtacgtcctcggctcggcgcatcaaggatgcctcccgccgtttccagcggacgtcttcatggtcccacagtatggatacctcaccctgaacaacgggagtcaggcggtaggacgctcttccttttactgcctggagtactttccttctcagatgctgcgtaccggaaacaactttaccttcagctacacctttgaggacgtgcccttccacagcagctacgctcacagccagagtttggaccggctgatgaatcctctgatcgaccagtatctgtattatctgaacaggacacaatcaaatagtggaactcttcagcagtctaggctactgtttagccaagctggacccaccagcatgtcccttcaagctaaaaactggctgcctggaccttgctacagacagcagcgtctgtcaaagcaggcaaacgacaacaacaacagcaactttccctggactgcggctacaaagtatcatctaaatggtcgggactcgttggttaatccaggaccagctatggccagccacaaagacgatgaagaaaagtttttccccatgcatggaaccctgatatttggtaaacaaggaacaaatgctaacgacgcggatttggaacatgtcatgattacagatgaagaagaaatcaggaccaccaatcccgtggctacagagcagtacggaaacgtgtcaaataatttgcaaaactcaaatactggtccaactacagaaaatgtcaatcaccagggagcgttacctggtatggtgtggcaggatcgagacgtgtacctgcagggacccatttgggccaagattcctcacaccgacggacactttcacccttctccactgatgggaggttttggactcaaacacccgcctcctcaaatcatgatcaaaaacactcctgttccagccaatcctcctacaaacttcagcgcggcaaagtttgcttccttcatcacacagtattccacgggacaggtcagcgtggagatcgagtgggagctgcagaaggagaacagcaaacgctggaaccccgagatccagtacacttccaactacaacaaatctgttaatgtggactttactgtggacgctaatggtgtgtattcagagcctcgccccattggcaccagatacctgactcgtaatctgtaa

SEQ ID NO: 3732 - DNA, 2205 bp, Artificial Sequence
  source: /note="Description of Artificial Sequence: Synthetic polynucleotide"
atggctgccgatggttatcttccagattggctcgaggacattctctctgaaggaataagacagtggtggaagctcaaacctggcccaccaccaccaaagcccgcagagcggcataaggacgacagcaggggtcttgtgcttcctgggtacaagtacctcggacccttcaacggactcgacaaaggagagccggtcaacgaggcagacgccgcggccctcgagcacgacaaggcctacgaccggcagctcgacagcggagacaacccgtacctcaagtacaaccacgccgacgcggagtttcaggagcgtcttaaagaagatacgtcttttgggggcaacctcggacgagcagtcttccaggcaaaaaagagggttcttgaacctctgggcctggttgaggaacctgttaagacggctccgggaaaaaagaggccggtagagcaatctcctgcggagccagactcctcctcgggaaccggaaaggcgggcaaccagcctgcaagaaagagattgaattttggtcagactggagacgcagactccgtacctgacccccagcctctcggacagccaccagcagccccctctggtctgggatctactacaatggctacaggcagtggcgcaccaatggcagacaataacgagggtgccgatggagtgggtaattcctcaggaaattggcattgcgattcccaatggttgggcgacagagtcatcaccaccagcacccgaacctgggccctgcccacctacaacaatcacctctacaagcaaatctccagccaatcaggagcagcgaacgacaaccactactttggctacagcaccccctgggggtattttgacttcaacagattccactgccacttttcaccacgtgactggcaaagactcatcaacaacaactggggattccgacccaaaagactcaacttcaagctctttaacattcaagtcaaagaggtcacgcagaatgacggtacgacgacgattgccaataaccttaccagcacggttcaggtgtttactgactcggagtaccagctcccgtacgtcctcggctcggcgcatcaaggatgcctcccgccgtttccagcggacgtcttcatggtcccacagtatggatacctcaccctgaacaacgggagtcaggcggtaggacgctcttccttttactgcctggagtactttccttctcagatgcttcgtaccggaaacaactttaccttcagttacacctttgaagacgttcctttccacagcagctacgctcacagtcaaagtctggaccggctgatgaatcctctgatagaccagtacctgtattatctaaacaaaacacaatcaaatagtggaactcttcagcagtctcggctactgtttagtcaagctggacccaccagcatgtctcttcaagctaaaaactggctgcctggaccttgctacagacaacagcgtctgtcaaagcaggcaaacgacaacaacagcaactttccctggactgcggctacaaagtatcatctaaatggccgggactcgttggttaatccaggaccagctatggccagccacaaagacgatgaagaaaagtttttccccatgcatggaaccctgatatttggtaaacaaggaacaaatgctaacgacgcggatttggacaatgtcatgattacagatgaagaagaaatccgcaccaccaatcccgtggctacggagcagtacgggactgtgtcaaataatttgcaaaactcaaatactggtccaactactggaactgtcaatcaccaaggagcgttacctggtatggtgtggcaggatcgagacgtgtaccttcagggacccatttgggccaagattcctcacaccgatggacactttcatccttctccactgatgggaggttttggactcaaacacccgcctcctcagatcatgatcaaaaacactcccgttccagccaatcctcctacaaacttcagttctgccaagtttgcttctttcatcacacagtattccacggggcaggtcagcgtggagatagagtgggagctgcagaaggagaacagcaaacgctggaaccccgagatccagtatacttccaactacaacaagtctgttaatgtggactttactgtggacactaatggtgtgtattcagagcctcgccccattggcaccagatacctgactcgtaatctgtaa

SEQ ID NO: 3733 - DNA, 2208 bp, Artificial Sequence
  source: /note="Description of Artificial Sequence: Synthetic polynucleotide"
atggctgccgatggttatcttccagattggctcgaggacattctctctgaaggaataagacagtggtggaagctcaaacctggcccaccaccaccaaagcccgcagagcggcataaggacgacagcaggggtcttgtgcttcctgggtacaagtacctcggacccttcaacggactcgacaaaggagagccggtcaacgaggcagacgccgcggccctcgagcacgacaaggcctacgaccggcagctcgacagcggagacaacccgtacctcaagtacaaccacgccgacgcggagtttcaggagcgtcttaaagaagatacgtcttttgggggcaacctcggacgagcagtcttccaggcaaaaaagagggttcttgaacctctgggcctggttgaggaacctgttaagacggctccgggaaaaaagaggccggtagagcaatctcctgcggagccagactcctcctcgggaaccggaaaggcgggcaaccagcctgcaagaaagagattgaattttggtcagactggagacgcagactccgtacctgacccccagcctctcggacagccaccagcagccccctctggtctgggatctactacaatggctacaggcagtggcgcaccaatggcagacaataacgagggtgccgatggagtgggtaattcctcaggaaattggcattgcgattcccaatggttgggcgacagagtcatcaccaccagcacccgaacctgggccctgcccacctacaacaatcacctctacaagcaaatctccagccaatcaggagcagcgaacgacagccactactttggctacagcaccccctgggggtattttgacttcaacagattccactgccacttttcaccacgtgactggcaaagactcatcaacaacaactggggattccgacccaaaagactcaacttcaagctctttaacattcaagtcaaagaggtcacgcagaatgacggtacgacgacgattgccaataaccttaccagcacggttcaggtgtttactgactcggagtaccagctcccgtacgtcctcggctcggcgcatcaaggatgcctcccgccgtttccagcggacgtcttcatggtcccacagtatggatacctcaccctgaacaacgggagtcaggcggtaggacgctcttccttttactgcctggagtactttccttctcagatgcttcgtaccggaaacaactttaccttcagttacacctttgaagacgttcctttccacagcagctacgctcacagtcaaagtctggaccggctgatgaatcctctgatagaccagtacctgtattatctaaacaaaacacaatcaaatagtggaactcttcagcagtctcggctactgtttagtcaagctggacccaccagcatgtctcttcaagctaaaaactggctgcctggaccttgctacagacaacagcgtctgtcaaagcaggcaaacgacaacaacaacagcaactttccctggactgcggctacaaagtatcatctaaatggccgggactcgttggttaatccaggaccagctatggccagccacaaagacgatgaagaaaagtttttccccatgcatggaaccctgatatttggtaaacaaggaacaaatgctaacgacgcggatttggacaatgtcatgattacagatgaagaagaaatccgcaccaccaatcccgtggctacggagcagtacgggactgtgtcaaataatttgcaaaactcaaatactggtccaactactggaactgtcaatcaccaaggagcgttacctggtatggtgtggcaggatcgagacgtgtaccttcagggacccatttgggccaagattcctcacaccgatggacactttcatccttctccactgatgggaggttttggactcaaacacccgcctcctcagatcatgatcaaaaacactcccgttccagccaatcctcctacaaacttcagttctgccaagtttgcttctttcatcacacagtattccacggggcaggtcagcgtggagatagagtgggagctgcagaaggagaacagcaaacgctggaaccccgagatccagtatacttccaactacaacaagtctgttaatgtggactttactgtggacactaatggtgtgtattcagagcctcgccccattggcaccagatacctgactcgtaatctgtaa

SEQ ID NO: 3734 - DNA, 2208 bp, Artificial Sequence
  source: /note="Description of Artificial Sequence: Synthetic polynucleotide"
atggctgccgatggttatcttccagattggctcgaggacactctctctgaaggaataagacagtggtggaagctcaaacctggcccaccaccaccaaggcccgcagagcggcatcaggacgacagcaggggtcttgtgcttcctgggtacaagtacctcggacccttcaacggactcgacaaaggagagccggtcaacgaggcagacgctgcggccctcgagcacgacaaggcctacgaccggcagctcgacagcggagacaacccgtacctcaagtacaaccacgccgacgcggagtttcaggagcgtcttaaagaagatacgtcttttgggggcaacctcggacgagcagtcttccaggcgaaaaagagggttcttgaacctctgggcctggttgaggaacctgttaagacggctccgggaaaaaagaggccggtagagcactctcctgcggagccagactcctcctcgggaaccggaaaagcgggccagcagcctgcaagaaagagattgaatttcggtcagactggagacgcagactccgtacctgacccccagcctctcggacagccaccagcagcccccacaagtttgggatctactacaatggctacaggcagtggcgcaccaatggcagacaataacgagggtgccgatggagtgggtaattcctcaggaaattggcattgcgattcccaatggctgggcgacagagtcatcaccaccagcacccgaacctgggccctgcccacctacaacaaccacctctacaagcaaatctccagccaatcaggagcatcgaacgacaaccactactttggctacagcaccccttgggggtattttgacttcaacagattccactgtcacttctccccacgtgactggcaaagactcatcaacaacaactggggattccgacccaagagactcaacttcaagctctttaacattcaagtcaaagaggtcacgcagaatgacggtacgacgacgattgccaataaccttaccagcacggttcaggtgtttactgactcggagtaccagctcccgtacgtcctcggctcggcgcatcaaggatgcctcccgccgtttccagcggacgtcttcatggtcccacagtatggatacctcaccctgaacaacgggagtcaggcggtaggacgctcttccttttactgcctggagtactttccttctcagatgctgcgtaccggaaacaactttaccttcagctacacctttgaggacgtgcccttccacagcagctacgctcacagccagagtttggaccggctgatgaatcctctgatcgaccagtatctgtattatctgaacaggacacaatcaaatagtggaactcttcagcagtctaggctactgtttagccaagctggacccaccagcatgtcccttcaagctaaaaactggctgcctggaccttgctacagacagcagcgtctgtcaaagcaggcaaacgacaacaacaacagcaactttccctggactgcggctacaaagtatcatctaaatggtcgggactcgttggttaatccaggaccagctatggccagccacaaagacgatgaagaaaagtttttccccatgcatggaaccctgatatttggtaaacaaggaacaaatgctaacgacacggatttggaacatgtcatgattacagatgaagaagaaatcaggaccaccaatcccgtggctacagagcagtacggaaacgtgtcaaataatttgcaaaactcaaatactggtccaactacagaaaatgtcaatcaccagggagcgttacctggtatggtgtggcaggatcgagacgtgtacctgcagggacccatttgggccaagattcctcacaccgacggacactttcacccttctccactgatgggaggttttgggctcaaacacccgcctcctcaaatcatgatcaaaaacactcctgttccagccaatcctcctacaaacttcagcgcggcaaagtttgcttccttcatcacacagtattccacgggacaggtcagcgtggagatcgagtgggagctgcagaaggagaacagcaaacgctggaaccccgagatccagtacacttccaactacaacaaatctgttaatgtggactttactgtggacgctaatggtgtgtattcagagcctcgccccattggcaccagatacctgactcgtaatctgtaa

SEQ ID NO: 3735 - DNA, 2205 bp, Artificial Sequence
  source: /note="Description of Artificial Sequence: Synthetic polynucleotide"
atggctgccgatggttatcttccagattggctcgaggacattctctctgaaggaataagacagtggtggaagctcaaacctggcccaccaccaaagcccgcagagcggcataaggacgacagcaggggtcttgtgcttcctgggtacaagtacctcggacccttcaacggactcgacaaaggagagccggtcaacgaggcagacgccgcggccctcgagcacgacaaggcctacgaccggcagctcgacagcggagacaacccgtacctcaagtacaaccacgccgacgcggagtttcaggagcgtcttaaagaagatacgtcttttgggggcaacctcggacgagcagtcttccaggcaaaaaagagggttcttgaacctctgggcctggttgaggaacctgttaagacggctccgggaaaaaagaggccggtagagcaatctcctgcggagccagactcctcctcgggaaccggaaaggcgggcaaccagcctgcaagaaagagattgaattttggtcagactggagacgcagactccgtacctgacccccagcctctcggacagccaccagcagccccctctggtctgggatctactacaatggctacaggcagtggcgcaccaatggcagacaataacgagggtgccgatggagtgggtaattcctcaggaaattggcattgcgattcccaatggttgggcgacagagtcatcaccaccagcacccgaacctgggccctgcccacctacaacaatcacctctacaagcaaatctccagccaatcaggagcagcgaacgacaaccactactttggctacagcaccccctgggggtattttgacttcaacagattccactgccacttttcaccacgtgactggcaaagactcatcaacaacaactggggattccgacccaaaagactcaacttcaagctctttaacattcaagtcaaagaggtcacgcagaatgacggtacgacgacgattgccaataaccttaccagcacggttcaggtgtttactgactcggagtaccagctcccgtacgtcctcggctcggcgcatcaaggatgcctcccgccgtttccagcggacgtcttcatggtcccacagtatggatacctcaccctgaacaacgggagtcaggcggtaggacgctcttccttttactgcctggagtactttccttctcagatgcttcgtaccggaaacaactttaccttcagttacacctttgaagacgttcctttccacagcagctacgctcacagtcaaagtctggaccggctgatgaatcctctgatagaccagtacctgtattatctaaacaaaacacaatcaaatagtggaactcttcagcagtctcggctactgtttagtcaagctggacccaccagcatgtctcttcaagctaaaaactggctgcctggaccttgctacagacaacagcgtctgtcaaagcaggcaaacgacaacaacaacagcaactttccctggactgcggctacaaagtatcatctaaatggccgggactcgttggttaatccaggaccagctatggccagccacaaagacgatgaagaaaagtttttccccatgcatggaaccctgatatttggtaaacaaggaacaaatgctaacgacgcggatttggacaatgtcatgattacagatgaagaagaaatccgcaccaccaatcccgtggctacggagcagtacgggactgtgtcaaataatttgcaaaactcaaatactggtccaactactggaactgtcaatcaccaaggagcgttacctggtatggtgtggcaggatcgagacgtgtaccttcagggacccatttgggccaagattcctcacaccgatggacactttcatccttctccactgatgggaggttttggactcaaacacccgcctcctcagatcatgatcaaaaacactcccgttccagccaatcctcctacaaacttcagttctgccaagtttgcttctttcatcacacagtattccacggggcaggtcagcgtggagatagagtgggagctgcagaaggagaacagcaaacgctggaaccccgagatccagtatacttccaactacaacaagtctgttaatgtggactttactgtggacactaatggtgtgtattcagagcctcgccccattggcaccagatacctgactcgtaatctgtaa

SEQ ID NO: 3736 - DNA, 2208 bp, Artificial Sequence
  source: /note="Description of Artificial Sequence: Synthetic polynucleotide"
atggctgccgatggttatcttccagattggctcgaggacactctctctgaaggaataagacagtggtggaagctcaaacctggcccaccaccaccaaggcccgcagagcggcatcaggacgacagcaggggtcttgtgcttcctgggtacaagtacctcggacccttcaacggactcgacaaaggagagccggtcaacgaggcagacgctgcggccctcgagcacgacaaggcctacgaccggcagctcgacagcggagacaacccgtacctcaagtacaaccacgccgacgcggagtttcaggagcgtcttaaagaagatacgtcttttgggggcaacctcggacgagcagtcttccaggcgaaaaagagggttcttgaacctctgggcctggttgaggaacctgttaagacggctccgggaaaaaagaggccggtagagcactctcctgcggagccagactcctcctcgggaaccggaaaagcgggccagcagcctgcaagaaagagattgaatttcggtcagactggagacgcagactccgtacctgacccccagcctctcggacagccaccagcagcccccacaagtttgggatctactacaatggctacaggcagtggcgcaccaatggcagacaataacgagggtgccgatggagtgggtaattcctcaggaaattggcattgcgattcccaatggctgggcgacagagtcatcaccaccagcacccgaacctgggccctgcccacctacaacaaccacctctacaagcaaatctccagccaatcaggagcatcgaacgacaaccactactttggctacagcaccccttgggggtattttgacttcaacagattccactgtcacttctccccacgtgactggcaaagactcatcaacaacaactggggattccgacccaagagactcaacttcaagctctttaacattcaagtcaaagaggtcacgcagaatgacggtacgacgacgattgccaataaccttaccagcacggttcaggtgtttactgactcggagtaccagctcccgtacgtcctcggctcggcgcatcaaggatgcctcccgccgtttccagcggacgtcttcatggtcccacagtatggatacctcaccctgaacaacgggagtcaggcggtaggacgctcttccttttactgcctggagtactttccttctcagatgctgcgtaccggaaacaactttaccttcagctacacctttggggacgtgcccttccacagcagctacgctcacagccagagtttggaccggctgatgaatcctctgatcgaccagtatctgtattatctgaacaggacacaatcaaatagtggaactcttcagcagtctaggctactgtttagccaagctggacccaccagcatgtcccttcaagctaaaaactggctgcctggaccttgctacagacagcagcgtctgtcaaagcaggcaaacgacaacaacaacagcaactttccctggactgcggctacaaagtatcatctaaatggtcgggactcgttggttaatccaggaccagctatggccagccacaaagacgatgaagaaaagtttttccccatgcatggaaccctgatatttggtaaacaaggaacaaatgctaacgacgcggatttggaacatgtcatgattacagatgaagaagaaatcaggaccaccaatcccgtggctacagagcagtacggaaacgtgtcaaataatttgcaaaactcaaatactggtccaactacagaaaatgtcaatcaccagggagcgttacctggtatggtgtggcaggatcgagacgtgtacctgcagggacccatttgggccaagattcctcacaccgacggacactttcacccttctccactgatgggaggttttggactcaaacacccgcctcctcaaatcatgatcaaaaacactcctgttccagccaatcctcctacaaacttcagcgcggcaaagtttgcttccttcatcacacagtattccacgggacaggtcagcgtggagatcgagtgggagctgcagaaggagaacagcaaacgctggaaccccgagatccagtacacttccaactacaacaaatctgttaatgtggactttactgtggacgctaatggtgtgtattcagagcctcgccccattggcaccagatacctgactcgtaatctgtaa

SEQ ID NO: 3737 - DNA, 2208 bp, Artificial Sequence
  source: /note="Description of Artificial Sequence: Synthetic polynucleotide"
atggctgccgatggttatcttccagattggctcgaggacactctctctgaaggaataagacagtggtggaagctcaaacctggcccaccaccaccaaggcccgcagagcggcatcaggacgacagcaggggtcttgtgcttcctgggtacaagtacctcggacccttcaacggactcgacaaaggagagccggtcaacgaggcagacgctgcggccctcgagcacgacaaggcctacgaccggcagctcgacagcggagacaacccgtacctcaagtacaaccacgccgacgcggagtttcaggagcgtcttaaagaagatacgtcttttgggggcaacctcggacgagcagtcttccaggcgaaaaagagggttcttgaacctctgggcctggttgaggaacctgttaagacggctccgggaaaaaagaggccggtagagcactctcctgcggagccagactcctcctcgggaaccggaaaagcgggccagcagcctgcaagaaagagattgaatttcggtcagactggagacgcagactccgtacctgacccccagcctctcggacagccaccagcagcccccacaagtttgggatctactacaatggctacaggcagtggcgcaccaatggcagacaataacgagggtgccgatggagtgggtaattcctcaggaaattggcattgcgattcccaatggctgggcgacagagtcatcaccaccagcacccgaacctgggccctgcccacctacaacaaccacctctacaagcaaatctccagccaatcaggagcatcgaacgacagccactactttggctacagcaccccttgggggtattttgacttcaacagattccactgtcacttctccccacgtgactggcaaagactcatcaacaacaactggggattccgacccaagagactcaacttcaagctctttaacattcaagtcaaagaggtcacgcagaatgacggtacgacgacgattgccaataaccttaccagcacggttcaggtgtttactgactcggagtaccagctcccgtacgtcctcggctcggcgcatcaaggatgcctcccgccgtttccagcggacgtcttcatggtcccacagtatggatacctcaccctgaacaacgggagtcaggcggtaggacgctcttccttttactgcctggagtactttccttctcagatgctgcgtaccggaaacaactttaccttcagctacacctttgaggacgtgcccttccacagcagctacgctcacagccagagtttggaccggctgatgaatcctctgatcgaccagtatctgtattatctgaacaggacacaatcaaatagtggaactcttcagcagtctaggctactgtttagccaagctggacccaccagcatgtcccttcaagctaaaaactggctgcctggaccttgctacagacagcagcgtctgtcaaagcaggcaaacgacaacaacaacagcaactttccctggactgcggctacaaagtatcatctaaatggtcgggactcgttggttaatccaggaccagctatggccagccacaaagacgatgaagaaaagtttttccccatgcatggaaccctgatatttggtaaacaaggaacaaatgctaacgacgcggatttggaacatgtcatgattacagatgaagaagaaatcaggaccaccaatcccgtggctacagagcagtacggaaacgtgtcaaataatttgcaaaactcaaatactggtccaactacagaaaatgtcaatcaccagggagcgttacctggtatggtgtggcaggatcgagacgtgtacctgcagggacccatttgggccaagattcctcacaccgacggacactttcacccttctccactgatgggaggttttggactcaaacacccgcctcctcaaatcatgatcaaaaacactcctgttccagccaatcctcctacaaacttcagcgcggcaaagtttgcttccttcatcacacagtattccacgggacaggtcagcgtggagatcgagtgggagctgcagaaggagaacagcaaacgctggaaccccgagatccagtacacttccaactacaacaaatctgttaatgtggactttactgtggacgctaatggtgtgtattcagagcctcgccccattggcaccagatacctgactcgtaatctgtaa

SEQ ID NO: 3738 - DNA, 2208 bp, Artificial Sequence
  source: /note="Description of Artificial Sequence: Synthetic polynucleotide"
atggctgccgatggttatcttccagattggctcgaggacactctctctgaaggaataagacagtggtggaagctcaaacctggcccaccaccaccaaggcccgcagagcggcatcaggacgacagcaggggtcttgtgcttcctgggtacaagtacctcggacccttcaacggactcgacaaaggagagccggtcaacgaggcagacgctgcggccctcgagcacgacaaggcctacgaccggcagctcgacagcggagacaacccgtacctcaagtacaaccacgccgacgcggagtttcaggagcgtcttaaagaagatacgtcttttgggggcaacctcggacgagcagtcttccaggcgaaaaagagggttcttgaacctctgggcctggttgaggaacctgttaagacggctccgggaaaaaagaggccggtagagcactctcctgcggagccagactcctcctcgggaaccggaaaagcgggccagcagcctgcaagaaagagattgaatttcggtcagactggagacgcagactccgtacctgacccccagcctctcggacagccaccagcagcccccacaagtttgggatctactacaatggctacaggcagtggcgcaccaatggcagacaataacgagggtgccgatggagtgggtaattcctcaggaaattggcattgcgattcccaatggctgggcgacagagtcatcaccaccagcacccgaacctgggccctgcccacctacaacaaccacctctacaagcaaatctccagccaatcaggagcatcgaacgacaaccactactttggctacagcaccccttgggggtattttgacttcaacagattccactgtcacttctccccacgtgactggcaaagactcatcaacaacaactggggattccgacccaagagactcaacttcaagctctttaacattcaagtcaaagaggtcacgcagaatgacggtacgacgacgattgccaataaccttaccagcacgattcaggtgtttactgactcggagtaccagctcccgtacgtcctcggctcggcgcatcaaggatgcctcccgccgtttccagcggacgtcttcatggtcccacagtatggatacctcaccctgaacaacgggagtcaggcggtaggacgctcttccttttactgcctggagtactttccttctcagatgctgcgtaccggaaacaactttaccttcagctacacctttgaggacgtgcccttccacagcagctacgctcacagccagagtttggaccggctgatgaatcctctgatcgaccagtatctgtattatctgaacaggacacaatcaaatagtggaactcttcagcagtctaggctactgtttagccaagctggacccaccagcatgtcccttcaagctaaaaactggctgcctggaccttgctacagacagcagcgtctgtcaaagcaggcaaacgacaacaacaacagcaactttccctggactgcggctacaaagtatcatctaaatggtcgggactcgttggttaatccaggaccagctatggccagccacaaagacgatgaagaaaagtttttccccatgcatggaaccctgatatttggtaaacaaggaacaaatgctaacgacgcggatttggaacatgtcatgattacagatgaagaagaaatcaggaccaccaatcccgtggctacagagcagtacggaaacgtgtcaaataatttgcaaaactcaaatactggtccaactacagaaaatgtcaatcaccagggagcgttacctggtatggtgtggcaggatcgagacgtgtacctgcagggacccatttgggccaagattcctcacaccgacggacactttcacccttctccactgatgggaggttttggactcaaacacccgcctcctcaaatcatgatcaaaaacactcctgttccagccaatccccctacaaacttcagcgcggcaaagtttgcttccttcatcacacagtattccacgggacaggtcagcgtggagatcgagtgggagctgcagaaggagaacagcaaacgctggaaccccgagatccagtacacttccaactacaacaaatctgttaatgtggactttactgtggacgctaatggtgtgtattcagagcctcgccccattggcaccagacacctgactcgtaatctgtaa

SEQ ID NO: 3739 - DNA, 2208 bp, Artificial Sequence
  source: /note="Description of Artificial Sequence: Synthetic polynucleotide"
atggctgccgatggttatcttccagattggctcgaggacactctctctgaaggaataagacagtggtggaagctcaaacctggcccaccaccaccaaggcccgcagagcggcatcaggacgacagcaggggtcttgtgcttcctgggtacaagtacctcggacccttcaacggactcgacaaaggagagccggtcaacgaggcagacgctgcggccctcgagcacgacaaggcctacgaccggcagctcgacagcggagacaacccgtacctcaagtacaaccacgccgacgcggagtttcaggagcgtcttaaagaagatacgtcttttgggggcaacctcggacgagcagtcttccaggcgaaaaagagggttcttgaacctctgggcctggttgaggaacctgttaagacggctccgggaaaaaagaggccggtagagcactctcctgcggagccagactcctcctcgggaaccggaaaagcgggccagcagcctgcaagaaagagattgaatttcggtcagactggagacgcagactccgtacctgacccccagcctctcggacagccaccagcagcccccacaagtttgggatctactacaatggctacaggcagtggcgcaccaatggcagacaataacgagggtgccgatggagtgggtaattcctcaggaaattggcattgcgattcccaatggctgggcgacagagtcatcaccaccagcacccgaacctgggccctgcccacctacaacaaccacctctacaagcaaatctccagccaatcaggagcatcgaacgacaaccactactttggctacagcaccccttgggggtattttgacttcaacagattccactgtcacttctccccacgtgactggcaaagactcatcaacaacaactggggattccgacccaagagactcaacttcaagctctttaacattcaagtcaaagaggtcacgcagaatgacggtacgacgacgattgccaataaccttaccagcacggttcaggtgtttactgactcggagtaccagctcccgtacgtcctcggctcggcgcatcaaggatgcctcccgccgtttccagcggacgtcttcatggtcccacagtatggatacctcaccctgaacaacgggagtcaggcggtaggacgctcttccttttactgcctggagtactttccttctcagatgctgcgtaccggaaacaactttaccttcagctacacctttgaggacgtgcccttccacagcagctacgctcacagccagagtttggaccggctgatgaatcctctgatcgaccagtatctgtattatctgaacaggacacaatcaaatagtggaactcttcagcagtctgggctactgtttagccaagctggacccaccagcatgtcccttcaagctaaaaactggctgcctggaccttgctacagacagcagcgtctgtcaaagcaggcaaacgacaacaacaacagcaactttccctggactgcggctacaaagtatcatctaaatggtcgggactcgttggttaatccaggaccagctatggccagccacaaagacgatgaagaaaagtttttccccatgcatggaaccctgatatttggtaaacaaggaacaaatgctaacgacacggatttggaacatgtcatgattacagatgaagaagaaatcaggaccaccaatcccgtggctacagagcagtacggaaacgtgtcaaataatttgcaaaactcaaatactggtccaactacagaaaatgtcaatcaccagggagcgttacctggtatggtgtggcaggatcgagacgtgtacctgcagggacccatttgggccaagattcctcacaccgacggacactttcacccttctccactgatgggaggttttggactcaaacacccgcctcctcaaatcatgatcaaaaacactcctgttccagccaatcctcctacaaacttcagcgcggcaaagtttgcttccttcatcacacagtattccacgggacaggtcagcgtggagatcgagtgggagctgcagaaggagaacagcaaacgctggaaccccgagatccagtacacttccaactacaacaaatctgttaatgtggactttactgtggacgctaatggtgtgtattcagagcctcgccccattggcaccagatacctgactcgtaatctgtaa

SEQ ID NO: 3740 - DNA, 2208 bp, Artificial Sequence
  source: /note="Description of Artificial Sequence: Synthetic polynucleotide"
atggctgccgatggttatcttccagattggctcgaggacactctctctgaaggaataagacagtggtggaagctcaaacctggcccaccaccaccaaggcccgcagagcggcatcaggacgacagcaggggtcttgtgcttcctgggtacaagtacctcggacccttcaacggactcgacaaaggagagccggtcaacgaggcagacgctgcggccctcgagcacgacaaggcctacgaccggcagctcgacagcggagacaacccgtacctcaagtacaaccacgccgacgcggagtttcaggagcgtcctaaagaagatacgtcttttgggggcaacctcggacgagcagtcttccaggcgaaaaagagggttcttgaacctctgggcctggttgaggaacctgttaagacggctccgggaaaaaagaggccggtagagcactctcctgcggagccagactcctcctcgggaaccggaaaagcgggccagcagcctgcaagaaagagattgaatttcggtcagactggagacgcagactccgtacctgacccccagcctctcggacagccaccagcagcccccacaagtttgggatctactacaatggctacaggcagtggcgcaccaatggcagacaataacgagggtgccgatggagtgggtaattcctcaggaaattggcattgcgattcccaatggctgggcgacagagtcatcaccaccagcacccgaacctgggccctgcccacctacaacaaccacctctacaagcaaatctccagccaatcaggagcatcgaacgacaaccactactttggctacagcaccccttgggggtattttgacttcaacagattccactgtcacttctccccacgtgactggcaaagactcattaacaacaactggggattccgacccaagagactcaacttcaagctctttaacattcaagtcaaagaggtcacgcagaatgacggtacgacgacgattgccaataaccttaccagcacggttcaggtgtttactgactcggagtaccagctcccgtacgtcctcggctcggcgcatcaaggatgcctcccgccgtttccagcggacgtcttcatggtcccacagtatggatacctcaccctgaacaacgggagtcaggcggtaggacgctcttccttttactgcctggagtactttccttctcagatgctgcgtaccggaaacaactttaccttcagctacacctttgaggacgtgcccttccacagcagctacgctcacagccagagtttggaccggctgatgaatcctctgatcgaccagtatctgtattatctgaacaggacacaatcaaatagtggaactcttcagcagtctaggctactgtttagccaagctggacccaccagcatgtcccttcaagctaaaaactggctgcctggaccttgctacagacagcagcgtctgtcaaagcaggcaaacgacaacaacaacagcaactttccctggactgcggctacaaagtatcatctaaatggtcgggactcgttggttaatccaggaccagctatggccagccacaaagacgatgaagaaaagtttttccccatgcatggaaccctgatatttggtaaacaaggaacaaatgctaacgacgcggatttggaacatgtcatgattacagatgaagaagaaatcaggaccaccaatcccgtggctacagagcagtacggaaacgtgtcaaataatttgcaaaactcaaatactggtccaactacagaaaatgtcaatcaccagggagcgttacctggtatggtgtggcaggatcgagacgtgtacctgcagggacccatttgggccaagattcctcacaccgacggacactttcacccttctccactgatgggaggttttggactcaaacacccgcctcctcaaatcatgatcaaaaacactcctgttccagccaatcctcctacaaacttcagcgcggcaaagtttgcttccttcatcacacggtattccacgggacaggtcagcgtggagatcgagtgggagctgcagaaggagaacagcaaacgctggaaccccgagatccagtacacttccaactacaacaaatctgttaatgtggactttactgtggacgctaatggtgtgtattcagagcctcgccccattggcaccagatacctgactcgtaatctgtaa

SEQ ID NO: 3741 - DNA, 2208 bp, Artificial Sequence
  source: /note="Description of Artificial Sequence: Synthetic polynucleotide"
atggctgccgatggttatcttccagattggctcgaggacactctctctgaaggaataagacagtggtggaagctcaaacctggcccaccaccgccaaagcccgcagagcggcataaggacgacagcaggggtcttgtgcttcctgggtacaagtacctcggacccttcaacggactcgacaagggagagccggtcaacgaggcagacgccgcggccctcgagcacgacaaggcctacgaccggcagctcgacagcggagacaacccgtacctcaagtacaaccacgccgacgcggagcttcaggagcgccttaaagaagatacgtcttttgggggcaacctcggacgagcagtattccaggcgaaaaagagggttcttgaacctctgggcctggttgaggagcctgttaagacggctccgggaaaaaagaggccggtagagcactctcctgtggagccagactcctcctcgggaaccggaaaagcgggccagcagcctgcgagaaagagattgaattttggtcagactggagacgcagactccgtacctgacccccagcctctcggacagccaccagcagcccccacaagtttgggatctactacaatggctacaggcagtggcgcaccaatggcagacaataacgagggtgccgatggagtgggtaattcctcaggaaattggcattgcgattcccaatggtcgggcgacagagtcatcaccaccagcacccgaacctgggccctgcccacctacaacaaccacctctacaagcaaatctccagccaatcaggagccagcaacgacaaccactactttggctacagcaccccctgggggtattttgacttcaacagattccactgccacttttcaccacgtgactggcaaagactcatcaacaacaactggggattccgacccaagagactcaacttcaagctctttaacattcaagtcaaaggggtcacgcagaatgacggtacgacgacgattgccaataaccttaccagcacggttcaggtgtttactgactcggagtaccagctcccgtacgtcctcggctcggcgcatcaaggatgcctcccgccgtttccagcggacgtcttcatggtcccacagtatggatacctcaccctgaacaacgggagtcaggcggtaggacgctcttccttttactgcctggagtactttccttctcagatgcttcgtaccggaaacaactttaccttcagttacacctttgaagacgttcctttccacagcagctacgctcacagtcaaagtctggaccggctgatgaatcctcttatcgaccagtacctgtattatctaaacaaaacacaatcaaatagtggaactcttcagcagtctcggctactgtttagtcaagctggacctaccagcatgtctcttcaagctaaaaactggctgcctggaccttgctacagacaacagcgtctgtcaaagcaggcaaacgacaacaacaacagcaactttccctggactgcggctacaaagtatcatctaaatggccgggactcgttggttaatccaggaccagctatggccagccacaaagacgatgaagaaaagtttttccccatgcatggaaccctgatatttggcaaacaaggaacaaatgctaacgacgcggatttggacaatgtcatgattacagatgaagaagaaatccgtaccaccaatcccgtggctacggagcagtacgggactgtgtcaaataatttgcaaaactcaaatactggtccaactactggaactgtcaatcaccaaggagcgttacctggtatggtgtggcaggatcgagacgtgtaccttcagggacccatttgggccaagattcctcacaccgatggacactttcacccttctccgctgatgggaggttttggactcaaacacccgcctcctcagatcatgatcaaaaacactcccgttccagccaatcctcccacaaacttcagttctgccaagtttgcttctttcatcacacagtattccacgggacaggttagcgtggagatcgagtgggagctgcagaaggagaacagcaaacgctggaaccccgagatccagtacacttccaactacaacaagtctgttaatgtggactttactgtggacactaatggtgtgtattcagagcctcgccccattggcaccagatacctgactcgtaatctgtaa

SEQ ID NO: 3742 - DNA, 2208 bp, Artificial Sequence
  source: /note="Description of Artificial Sequence: Synthetic polynucleotide"
atggctgccgatggttatcttccagattggctcgaggacattctctctgaaggaataagacagtggtggaagctcaaacctggcccaccaccaccaaagcccgcagagcggcataaggacgacagcaggggtcttgtgcttcctgggtacaagtacctcggacccttcaacggactcgacaaaggagagccggtcaacgaggcagacgccgcggccctcgagcacgacaaggcctacgaccggcagctcgacagcggagacaacccgtacctcaagtacaaccacgccgacgcggagtttcaggagcgtcttaaagaagatacgtcttttgggggcaacctcggacgagcagtcttccaggcaaaaaagagggttcttgaacctctgggcctggttgaggaacctgttaagacggctccgggaaaaaagaggccggtagagcaatctcctgcggagccagactcctcctcgggaaccggaaaggcgggcaaccagcctgcaagaaagagattgaattttggtcagactggagacgcagactccgtacctgacccccagcctctcggacatccaccagcagccccctctggtctgggatctactacaatggctacaggcagtggcgcaccaatggcagacaataacgagggtgccgatggagtgggtaattcctcaggaaattggcattgcgattcccaatggttgggcgacagagtcatcaccaccagcacccgaacctgggccctgcccacctacaacaatcacctctacaagcaaatctccagccaatcaggagccagcaacgacaaccactactttggctacagcaccccctgggggtattttgacttcaacagattccactgccacttttcaccacgtgactggcaaagactcatcaacaacaactggggattccgacccaaaagactcaacttcaagctctttaacattcaagtcaaagaggtcacgcagaatgacggtacgacgacgattgccaataaccttaccagcacggttcaggtgtttactgactcggagtaccagctcccgtacgtcctcggctcggcgcatcaaggatgcctcccgccgtttccagcggacgtcttcatggtcccacagtatggatacctcaccctgaacaacgggagtcaggcggtaggacgctcttccttttactgcctggagtactttccttctcagatgcttcgtaccggaaacaactttaccttcagttacacctttgaagacgttcctttccacagcagctacgctcacagtcaaagtctggaccggctgatgaatcctctgatagaccagtacctgtattatctaaacaaaacacaatcaaatagtggaactcttcagcagtctcggctactgtttagtcaagctggacccaccagcatgtctcttcaagctaaaaactggctgcctggaccttgctacagacaacagcgtctgtcaaagcaggcaaacgacaacaacaacagcaactttccctggactgcggctacaaagtatcatctaaatggccgggactcgttggttaatccaggaccagctatggccagccacaaagacgatgaagaaaagtttttccccatgcatggaaccctgatatttggtaaacaaggaacaaatgctaacgacgcggatttggacaatgtcatgattacagatgaagaagaaatccgcaccaccaatcccgtggctacggagcagtacgggactgtgtcaaataatttgcaaaactcaaatactggtccaactactggaactgtcaatcaccaaggagcgttacctggtatggtgtggcaggatcgagacgtgtaccttcagggacccatttgggccaagattcctcacaccgatggacactttcatccttctccactgatgggaggttttggactcaaacacccgcctcctcagatcatgatcaaaaacactcccgttccagccaatcctcctacaaacttcagttctgccaagtttgcttctttcatcacacagtattccacggggcaggtcagcgtggagatagagtgggagctgcagaaggagaacagcaaacgctggaaccccgagatccagtatacttccaactacaacaagtctgttaatgtggactttactgtggacactaatggtgtgtattcagagcctcgccccattggcaccagatacctgactcgtaatctgtaa

SEQ ID NO: 3743 - DNA, 2208 bp, Artificial Sequence
  source: /note="Description of Artificial Sequence: Synthetic polynucleotide"
atggctgccgatggttatcttccagattggctcgaggacattctctctgaaggaataagacagtggtggaagctcaaacctggcccaccaccaccaaagcccgcagagcggcataaggacgacagcaggggtcttgtgcttcctgggtacaagtacctcggacccttcaacggactcgacaaaggagagccggtcaacgaggcagacgccgcggccctcgagcacgacaaggcctacgaccggcagctcgacagcggagacaacccgtacctcaagtacaaccacgccgacgcggagtttcaggagcgtcttaaagaagatacgtcttttgggggcaacctcggacgagcagtcttccaggcaaaaaagagggttcttgaacctctgggcctggttgaggaacctgttaagacggctccgggaaaaaagaggccggtagagcaatctcctgcggagccagactcctcctcgggaaccggaaaggcgggcaaccagcctgcaagaaagagattgaattttggtcagactggagacgcagactccgtacctgacccccagcctctcggacagccaccagcagccccctctggtctgggatctactacaatggctacaggcagtggcgcaccaatggcagacaataacgagggtgccgatggagtgggtaattcctcaggaaattggcattgcgattcccaatggttgggcgacagagtcatcaccaccagcacccgaacctgggccctgcccacctacaacaatcacctctacaagcaaatctccagccaatcaggagccagcaacgacaaccactactttggctacagcaccccctgggggtattttgacttcaacagattccactgccacttttcaccacgtgactggcaaagactcatcaacaacaactggggattccgacccaaaagactcaacttcaagctctttaacattcaagtcaaagaggtcacgcagaatgacggtacgacgacgattgccaataaccttaccagcacggttcaggtgtttactgactcggagtaccagctcccgtacgtcctcggctcggcgcatcaaggatgcctcccgccgtttccagcggacgtcttcatggtcccacagtatggatacctcaccctgaacaacgggagtcaggcggtaggacgctcttccttttactgcctggagtactttccttctcagatgcttcgtaccggaaacaactttaccttcagttacacctttgaagacgttcctttccacagcagctacgctcacagtcaaagtctggaccggctgatgaatcctctgatagaccagtacctgtattatctaaacaaaacacaatcaaatagtggaactcttcagcagtctcggctactgtttagtcaagctggacccaccagcatgtctcttcaagctaaaaactggctgcctggaccttgctacagacaacagcgtctgtcaaagcaggtaaacgacaacaacaacagcaactttccctggactgcggctacaaagtatcatctaaatggccgggactcgttggttaatccaggaccagctatggccagccacaaagacgatgaagaaaagtttttccccatgcatggaaccctgatatttggtaaacaaggaacaaatgctaacgacgcggatttggacaatgtcatgattacagatgaagaagaaatccgcaccaccaatcccgtggctacggagcagtacgggactgtgtcaaataatttgcaaaactcaaatactggtccaactactggaactgtcaatcaccaaggagcgttacctggtatggtgtggcaggatcgagacgtgtaccttcagggacccatttgggccaagattcctcacaccgatggacactttcatccttctccactgatgggaggttttggactcaaacacccgcctcctcagatcatgatcaaaaacactcccgttccagccaatcctcctacaaacttcagttctgccaagtttgcttctttcatcacacagtattccacggggcaggtcagcgtggagatagagtgggagctgcagaaggagaacagcaaacgctggaaccccgagatccagtatacttccaactacaacaagtctgttaatgtggactttactgtggacactaatggtgtgtattcagagcctcgccccattggcaccagatacctgactcgtaatctgtaa

SEQ ID NO: 3744 - DNA, 2208 bp, Artificial Sequence
  source: /note="Description of Artificial Sequence: Synthetic polynucleotide"
atggctgccgatggttatcttccagattggctcgaggacattctctctgaaggaataagacagtggtggaagctcaaacctggcccaccaccaccaaagcccgcagagcggcataaggacgacagcaggggtcttgtgcttcctgggtacaagtacctcggacccttcaacggactcgacaaaggagagccggtcaacgaggcagacgccgcggccctcgagcacgacaaggcctacgaccggcagctcgacagcggagacaacccgtacctcaagtacaaccacgccgacgcggagtttcaggagcgtcttaaagaagatacgtcttttgggggcaacctcggacgagcagtcttccaggcaaaaaagagggttcttgaacctctgggcctggttgaggaacctgttaagacggctccgggaaaaaagaggccggtagagcaatctcctgcggagccagactcctcctcgggagccggaaaggcgggcaaccagcctgcaagaaagagattgaattttggtcagactggagacgcagactccgtacctgacccccagcctctcggacagccaccagcagccccctctggtctgggatctactacaatggctacaggcagtggcgcaccaatggcagacaataacgagggtgccgatggagtgggtaattcctcaggaaattggcattgcgattcccaatggttgggcgacagagtcatcaccaccagcacccgaacctgggccctgcccacctacaacaatcacctctacaagcaaatctccagccaatcaggagccagcaacgacaaccactactttggctacagcaccccctgggggtattttgacttcaacagattccactgccacttttcaccacgtgactggcaaagactcatcaacaacaactggggattccgacccaaaagactcaacttcaagctctttaacattcaagtcaaagaggtcacgcagaatgacggtacgacgacgattgccaataaccttaccagcacggttcaggtgtttactgactcggagtaccagctcccgtacgtcctcggctcggcgcatcaaggatgcctcccgccgtttccagcggacgtcttcatggtcccacagtatggatacctcaccctgaacaacgggagtcaggcggtaggacgctcttccttttactgcctggagtactttccttctcagatgcttcgtaccggaaacaactttaccttcagttacacctttgaagacgttcctttccacagcagctacgctcacagtcaaagtctggaccggctgatgaatcctctgatagaccagtacctgtattatctaaccaaaacacaatcaaatagtggaactcttcagcagtctcggctactgtttagtcaagctggacccaccagcatgtctcttcaagctaaaaactggctgcctggaccttgctacagacaacagcgtctgtcaaagcaggcaaacgacaacaacaacagcaactttccctggactgcggctacaaagtatcatctaaatggccgggactcgttggttaatccaggaccagctatggccagccacaaagacgatgaagaaaagtttttccccatgcatggaaccctgatatttggtaaacaaggaacaaatgctaacgacgcggatttggacaatgtcatgattacagatgaagaagaaatccgcaccaccaatcccgtggctacggagcagtacgggactgtgtcaaataatttgcaaaactcaaatactggtccaactactggaactgtcgatcaccaaggagcgttacctggtatggtgtggcaggatcgagacgtgtaccttcagggacccatttgggccaagattcctcacaccgatggacactttcatccttctccactgatgggaggttttggactcaaacacccgcctcctcagatcatgatcaaaaacactcccgttccagccaatcctcctacaaacttcagttctgccaagtttgcttctttcatcacacagtattccacggggcaggtcagcgtggagatagagtgggagctgcagaaggagaacagcaaacgctggaaccccgagatccagtatacttccaactacaacaagtctgttaatgtggactttactgtggacactaatggtgtgtattcagagcctcgccccattggcaccagatacctgactcgtaatctgtaa

SEQ ID NO: 3745 - DNA, 2208 bp, Artificial Sequence
  source: /note="Description of Artificial Sequence: Synthetic polynucleotide"
atggctgccgatggttatcttccagattggctcgaggacattctctctgaaggaataagacagtggtggaagctcaaacctggcccaccaccaccaaagcccgcagagcggcataaggacgacagcaggggtcttgtgcttcctgggtacaagtacctcggacccttcaacggactcgacaaaggagagccggtcaacgaggcagacgccgcggccctcgagcacgacaaggcctacgaccggcagctcgacagcggagacaacccgtacctcaagtacaaccacgccgacgcggagtttcaggagcgtcttaaagaagatacgtcttttgggggcaacctcggacgagcagtcttccaggcaaaaaagagggttcttgaacctctgggcctggttgaggaacctgttaagacggctccgggaaaaaagaggccggtagagcaatctcctgcggagccagactcctcctcgggaaccggaaaggcgggcaaccagcctgcaagaaagagattgaattttggtcagactggagacgcagactccgtacctgacccccagcctctcggacagccaccagcagccccctctggtctgggatctactacaatggctacaggcagtggcgcaccaatggcagacaataacgagggtgccgatggagtgggtaattcctcaggaaattggcattgcgattcccaatggttgggcgacagagtcatcaccaccagcacccgaacctgggccctgcccacctacaacaatcacctctacaagcaaatctccagccaatcaggagccagcaacgacaaccactactttggctacagcaccccctgggggtattttgacttcaacagattccactgccacttttcaccacgtgactggcaaagactcatcaacaacaactggggattccgacccaaaagactcaacttcaagctctttaacattcaagtcaaagaggtcacgcagaatgacggtacgacgacgattgccaataaccttaccagcacggttcaggtgtttactgactcggagtaccagctcccgtacgtcctcggctcggcgcatcaaggatgcctcccgccgtttccagcggacgtcttcatggtcccacagtatggatacctcaccctgaacaacgggagtcaggcggtaggacgctcttccttttactgcctggagtactttccttctcagatgcttcgtaccggaaacaactttaccttcagttacacctttgaagacgttcctttccacagcagctacgctcacagtcaaagtctggaccggctgatgaatcctctgatagaccagtacctgtattatctaaacaaaacacaatcaaatagtggaactcttcagcagtctcggctactgcttagtcaagctggacccaccagcatgtctcttcaagctaaaaactggctgcctggaccttgctacagacaacagcgtctgtcaaagcaggcaaacgacaacaacaacagcaactttccctggactgcggctacaaagtatcatctaaatggccgggactcgttggttaatccaggaccagctatggccagccacaaagacgatgaagaaaagtttttccccatgcatggaaccctgatatttggtaaacaaggaacaaatgctaacgacgcggatttggacaatgtcatgattacagatgaagaagaaatccgcaccaccaatcccgtggctacggagcagtacgggactgtgtcaaataatttgcaaaactcaaatactggtccaactactggaactgtcaatcaccaaggagcgttacctggtatggtgtggcaggatcgagacgtgtaccttcagggacccatttgggccaagattcctcacaccgatggacactttcatccttctccactgatgggaggttttggactcaaacacccgcctcctcagatcatgatcaaaaacactcccgttccagccaatcctcctacaaacttcagttctgccaagtttgcttctttcatcacacagtattccacggggcaggtcagcgtggagatagagtgggagctgcagaaggagaacagcaaacgctggaaccccgagatccagtatacttccaactacaacaagtctgttaatgtggactttactgtggacactaatggtgtgtattcagagcctcgccccattggcaccagatacctgactcgtaatctgtaa

SEQ ID NO: 3746 - DNA, 2208 bp, Artificial Sequence
  source: /note="Description of Artificial Sequence: Synthetic polynucleotide"
atggctgccgatggttatcttccagattggctcgaggacactctctctgaaggaataagacagtggtggaagctcaaacctggcccaccaccgccaaagcccgcagagcggcataaggacgacagcaggggtcttgtgcttcctgggtacaagtacctcggacccttcaacggactcgacaagggagagccggtcaacgaggcagacgccgcggccctcgagcacgacaaggcctacgaccggcagctcgacagcggagacaacccgtacctcaagtacaaccacgccgacgcggagtttcaggagcgccttaaagaagatacgtcttttgggggcaacctcggacgagcagtattccaggcgaaaaagagggttcttgaacctctgggcctggttgaggagcctgttaagacggctccgggaaaaaagaggccggtagagcactctcctgtggagccagactcctcctcgggaaccggaaaagcgggccagcagcctgcgagaaagagattgaattttggtcagactggagacgcagactccgtacctgacccccagcctctcggacagccaccagcagcccccacaagtttgggatctactacaatggctacaggcagtggcgcaccaatggcagacaataacgagggtgccgatggagtggataattcctcaggaaattggcattgcgattcccaatggtcgggcgacagagtcatcaccaccagcacccgaacctgggccctgcccacctacaacaaccacctctacaagcaaatctccagccaatcaggagccagcaacgacaaccactactttggctacagcaccccctgggggtattttgacttcaacagattccactgccacttttcaccacgtgactggcaaagactcatcaacaacaactggggattccgacccaagagactcaacttcaagctctttaacattcaagtcaaagaggtcacgcagaatgacggtacgacgacgattgccaataaccttaccagcacggttcaggtgtctactgactcggagtaccagctcccgtacgtcctcggctcggcgcatcaaggatgcctcccgccgtttccagcggacgtcttcatggtcccacagtatggatacctcaccctgaacaacgggagtcaggcggtaggacgctcttccttttactgcctggagtactttccttctcagatgcttcgtaccggaaacaactttaccttcagttacacctttgaagacgttcctttccacagcagctacgctcacagtcaaagtctggaccggctgatgaatcctcttatcgaccagtacctgtattatctaaacaaaacacaatcaaatagtggaactcttcagcagtctcggctactgtttagtcaagctggacctaccagcatgtctcttcaagctaaaaactggctgcctggaccttgctacagacaacagcgtctgtcaaagcaggcaaacgacaacaacaacagcaactttccctggactgcggctacaaagtatcatctaaatggccgggactcgttggttaatccaggaccagctatggccagccacaaagacgatgaagaaaagtttttccccatgcatggaaccctgatatttggcaaacaaggaacaaatgctaacgacgcggatttggacaatgtcatgattacagatgaagaagaaatccgtaccaccaatcccgtggctacggagcagtacgggactgtgtcaaataatttgcaaaactcaaatactggtccaactactggaactgtcaatcaccaaggagcgttacctggtatggtgtggcaggatcgagacgtgtaccttcagggacccatttgggccaagattcctcacaccgatggacactttcacccttctccgctgatgggaggttttggactcaaacacccgcctcctcagatcatgatcaaaaacactcccgttccagccaatcctcccacaaacttcagttctgccaagtttgcttctttcatcacacagtattccacgggacaggttagcgtggagatcgagtgggagctgcagaaggagaacagcaaacgctggaaccccgagatccagtacacttccaactacaacaagtctgttaatgtggactttactgtggacactaatggtgtgtattcagagcctcgccccattggcaccagatacctgactcgtaatctgtaa

SEQ ID NO: 3747 - DNA, 2208 bp, Artificial Sequence
  source: /note="Description of Artificial Sequence: Synthetic polynucleotide"
atggctgccgatggttatcttccagattggctcgaggacactctctctgaaggaataagacagtggtggaagctcaaacctggcccaccaccgccaaagcccgcagagcggcataaggacgacagcaggggtcttgtgcttcctgggtacaagtacctcggacccttcaacggactcgacaagggagagccggtcaacgaggcagacgccgcggccctcgagcacgacaaggcctacgaccggcagctcgacagcggagacaacccgtacctcaagtacaaccacgccgacgcggagtttcaggagcgccttaaagaagatacgtcttttgggggcaacctcggacgagcagtattccaggcgaaaaagagggttcttgaacctctgggcctggttgaggagcctgttaagacggctccgggaaaaaagaggccggtagagcactctcctgtggagccagactcctcctcgggaaccggaaaagcgggccagcagcctgcgagaaagagattgaattttggtcagactggagacgcagactccgtacctgacccccagcctctcggacagccaccagcagcccccacaagtttgggatctactacaatggctacaggcagtggcgcaccaatggcagacaataacgagggtgccgatggagtgggtaattcctcaggaaattggcattgcgattcccaatggtcgggcgacagagtcatcaccaccagcacccgaacctgggccctgcccacctacaacaaccacctctacaagcaaatctccagccaatcaggagccagcaacgacaaccactactttggctacagcaccccctgggggtattttgacttcaacagattccactgccacttttcaccacgtgactggcaaagactcatcaacaacaactggggattccgacccaagagactcaacttcaagctctttaacattcaagtcaaagaggtcacgcagaatgacggtacgacgacgattgccaataaccttaccagcacggttcaggtgtttactgactcggagtaccagctcccgtacgtcctcggctcggcgcatcaaggatgcctcccgccgtttccggcggacgtcttcatggtcccacagtatggatacctcaccctgaacaacgggagtcaggcggtaggacgctcttccttttactgcctggagtactttccttctcagatgcttcgtaccggaaacaactttaccttcagttacacctttgaagacgttcctttccacagcagctacgctcacagtcaaagtctggaccggctgatgaatcctcttatcgaccagtacctgtattatctaaacaaaacacaatcaaatagtggaactcttcagcagtctcggctactgtttagtcaagctggacctaccagcatgtctcttcaagctaaaaactggctgcctggaccttgctgcagacaacagcgtctgtcaaagcaggcaaacgacaacaacaacagcaactttccctggactgcggctacaaagtatcatctaaatggccgggactcgttggttaatccaggaccagctatggccagccacaaagacgatgaagaaaagtttttccccatgcatggaaccctgatatttggcaaacaaggaacaaatgctaacgacgcggatttggacaatgtcatgattacagatgaagaagaaatccgtaccaccaatcccgtggctacggagcagtacgggactgtgtcaaataatttgcaaaactcaaatactggtccaactactggaactgtcaatcaccaaggagcgttacctggtatggtgtggcaggatcgagacgtgtaccttcagggacccatttgggccaagattcctcacaccgatggacactttcacccttctccgctgatgggaggttttggactcaaacacccgcctcctcagatcatgatcaaaaacactcccgttccagccaatcctcccacaaacttcagttctgccaagtttgcttctttcatcacacagtattccacgggacaggttagcgtggagatcgagtgggagctgcagaaggagaacagcaaacgctggaaccccgagatccagtacacttccaactacaacaagtctgttaatgtggactttactgtggacactaatggtgtgtattcagagcctcgccccattggcaccagatacctgactcgtaatctgtaa

SEQ ID NO: 3748 - DNA, 2208 bp, Artificial Sequence
  source: /note="Description of Artificial Sequence: Synthetic polynucleotide"
atggctgccgatggttatcttccagattggctcgaggacattctctctgaaggaataagacagtggtggaagctcaaacctggcccaccaccaccaaagcccgcagagcggcataaggacgacagcaggggtctcgtgcttcctgggtacaagtacctcggacccttcaacggactcgacaaaggagagccggtcaacgaggcagacgccgcggccctcgagcacgacaaggcctacgaccggcagctcgacagcggagacaacccgtacctcaagtacaaccacgccgacgcggagtttcaggagcgtcttaaagaagatacgtcttttgggggcaacctcggacgagcagtcttccaggcaaaaaagagggttcttgaacctctgggcctggttgaggaacctgttaagacggctccgggaaaaaagaggccggtagagcaatctcctgcggagccagactcctcctcgggaaccggaaaggcgggcaaccagcctgcaagaaagagattgaattttggtcagactggagacgcagactccgtacctgacccccagcctctcggacagccaccagcagccccctctggtctgggatctactacaatggctacaggcagtggcgcaccaatggcagacaataacgagggtgccgatggagtgggtaattcctcaggaaattggcattgcgattcccaatggttgggcgacagagtcatcaccaccagcacccgaacctgggccctgcccacctacaacaatcacctctacaagcaaatctccagccaatcaggagccagcaacgacaaccactactttggctacagcaccccctgggggtattttgacttcaacagattccactgccacttttcaccacgtgactggcaaagactcatcaacaacaactggggattccgacccaaaagactcaacttcaagctctttaacattcaagtcaaagaggtcacgcagaatgacggtacgacgacgattgccaataaccttaccagcacggttcaggtgtttactgactcggagtaccagctcccgtacgtcctcggctcggcgcatcaaggatgcctcccgccgtttccagcggacgtcttcatggtcccacagtatggatacctcaccctgaacaacgggagtcaggcggtaggacgctcttccttttactgcctggagtactttccttctcagatgcttcgtaccggaaacaactttaccttcagttacacctttgaagacgttcctttccacagcagctacgctcacagtcaaagtctggaccggctgatgaatcctctgatagaccagtacctgtattatctaaacaaaacacaatcaaatagtggaactcttcagcagtctcggctactgtttagtcaagctggacccaccagcatgtctcttcaagctaaaaactggctgcctggaccttgctacagacaacagcgtctgtcaaagcaggcaaacgacaacaacaacagcaactttccctggactgcggctacaaagtatcatctaaatggccgggactcgttggttaatccaggaccagctatggccagccacaaagacgatgaagaaaagtttttccccatgcatggaaccctgatatttggtaaacaaggaacaaatgctaacgacgcggatttggacaatgtcatgattacagatgaagaagaaatccgcaccaccaatcccgtggctacggagcagtacgggactgtgtcaaataatttgcaaaactcaaatactggtccaactactggaactgtcaatcaccaaggagcgttacctggtatggtgtggcaggatcgagacgtgtaccttcagggacccatttgggccaagattcctcacaccgatggacactttcatccttctccactgatgggaggttttggactcaaacacccgcctcctcagatcatgatcaaaaacactcccgttccagccaatcctcctacaaacttcagttctgccaagtttgcttctttcatcacacagtattccacggggcaggtcagcgtggagatagagcgggagctgcagaaggagaacagcaaacgctggaaccccgagatccagtatacttccaactacaacaagtctgttaatgtggactttactgtggacactaatggtgtgtattcagagcctcgccccattggcaccagatacctgactcgtaatctgtaa

SEQ ID NO: 3749 - DNA, 2208 bp, Artificial Sequence
  source: /note="Description of Artificial Sequence: Synthetic polynucleotide"
atggctgccgatggttatcttccagattggctcgaggacattctctctgaaggagtaagacagtggtggaagctcaaacctggcccaccaccaccaaagcccgcagagcggcataaggacgacagcaggggtcttgtgcttcctgggtacaagtacctcggacccttcaacggactcgacaaaggagagccggtcaacgaggcagacgccgcggccctcgagcacgacaaggcctacgaccggcagctcgacagcggagacaacccgtacctcaagtacaaccacgccgacgcagagtttcaggagcgtcttaaagaagatacgtcttttgggggcaacctcggacgagcagtcttccaggcaaaaaagagggttcttgaacctctgggcctggttgaggaacctgttaagacggctccgggaaaaaagaggccggtagagcaatctcctgcggagccagactcctcctcgggaaccggaaaggcgggcaaccagcctgcaagaaagagattgaattttggtcagactggagacgcagactccgtacctgacccccagcctctcggacagccaccagcagccccctctggtctgggatctactacaatggctacaggcagtggcgcaccaatggcagacaataacgagggtgccgatggagtgggtaattcctcaggaaattggcattgcgattcccaatggttgggcgacagagtcatcaccaccagcacccgaacctgggccctgcccacctacaacaatcacctctacaagcaaatctccagccaatcaggagccagcaacgacaaccactactttggctacagcaccccctgggggtattttgacttcaacagattccactgccacttttcaccacgtgactggcaaagactcatcaacaacaactggggattccgacccaaaagactcaacttcaagctctttaacattcaagtcaaagaggtcacgcagaatgacggtacgacgacgattgccaataaccttaccagcacggttcaggtgtttactgactcggagtaccagctcccgtacgtcctcggctcggcgcatcaaggatgcctcccgccgtttccagcggacgtcttcatggtcccacagtatggatacctcaccctgaacaacgggagtcaggcggtaggacgctcttccttttactgcctggagtactttccttctcagatgcttcgtaccggaaacaactttaccttcagttacacctttgaagacgttcctttccacagcagctacgctcacagtcaaagtctggaccggctgatgaatcctctgatagaccagtacctgtattatctaaacaaaacacaatcaaatagtggaactcttcagcagtctcggctactgtttagtcaagctggacccaccagcatgtctcttcaagctaaaaactggctgcctggaccttgctacagacaacagcgtctgtcaaagcaggcaaacgacaacaacaacagcaactttccctggactgcggctacaaagtatcatctaaatggccgggactcgttggttaatccaggaccagctatggccagccacaaagacgatgaagaaaagtttttccccatgcatggaaccctgatatttggtaaacaaggaacaaatgctaacgacgcggatttggacaatgtcatgattacagatgaagaagaaatccgcaccaccaatcccgtggctacggagcagtacgggactgtgtcaaataatttgcaaaactcaaatactggtccaactactggaactgtcaatcaccaaggagcgttacctggtatggtgtggcaggatcgagacgtgtaccttcagggacccatttgggccaagattcctcacaccgatggacactttcatccttctccactgatgggaggttttggactcaaacacccgcctcctcagatcatgatcaaaaacactcccgttccagccaatcctcctacaaacttcagttctgccaagtttgcttctttcatcacacagtattccacggggcaggtcagcgtggagatagagtgggagctgcagaaggagaacagcaaacgctggaaccccgagatccagtatacttccaactacaacaagtctgttaatgtggactttactgtggacactaatggtgtgtattcagagcctcgccccattggcaccagatacctgactcgtaatctgtaa

SEQ ID NO: 3750 - DNA, 2208 bp, Artificial Sequence
  source: /note="Description of Artificial Sequence: Synthetic polynucleotide"
atggctgccgatggttatcttccagattggctcgaggacactctctctgaaggaataagacagtggtggaagctcaaacctggcccaccaccgccaaagcccgcagagcggcataaggacgacagcaggggtcttgtgcttcctgggtacaagtacctcggacccttcaacggactcgacaagggagagccggtcaacgaggcagacgccgcggccctcgagcacgacaaggcctacgaccggcagctcgacagcggagacaacccgtacctcaagtacaaccacgccgacgcggagtttcaggagcgccttaaagaagatacgtcttttgggggcaacctcggacgagcagtattccaggcgaaaaagagggttcttgaacctctgggcctggttgaggagcctgttaagacggctccgggaaaaaagaggccggtagagcactctcctgtggagccagactcctcctcgggaaccggaaaagcgggccagcagcctgcgagaaagagattgaattttggtcagactggagacgcagactccgtacctgacccccagcctctcggacagccaccagcagcccccacaagtttgggatctactacaatggctacaggcagtggcgcaccaatggcagacaataacgagggtgccgatggagtgggtaattcctcaggaaattggcattgcgattcccaatggtcgggcgacagagtcatcaccaccagcacccgaacctgggccctgcccacctacaacaaccacctctacaagcaaatctccagccaatcaggagccagcaacgacaaccactactttggctacagcaccccctgggggtattttgacttcaacagattccactgccacttttcaccacgtgactggcaaagactcatcaacaacaactggggattccgacccaagagactcaacttcaagctctttaacattcaagtcaaagaggtcacgcagaatgacggtacgacgacgattgccaataaccttaccagcacggttcaggtgtctactgactcggagtaccagctcccgtacgtcctcggctcggcgcatcaaggatgcctcccgccgtttccagcggacgtcttcatggtcccacagtatggatacctcaccctgaacaacgggagtcaggcggtaggacgctcttccttttactgcctggagtactttccttctcagatgcttcgtaccggaaacaactttaccttcagttacacctttgaagacgttcctttccacagcagctacgctcacagtcaaagtctggaccggctgatgaatcctcttatcgaccagtacctgtattatctaaacaaaacacaatcaaatagtggaactcttcagcagtctcggctactgtttagtcaagctggacctaccagcatgtctcttcaagctaaaaactggctgcctggaccttgctacagacaacagcgtctgtcaaagcaggcaaacgacaacaacaacagcaactttccctggactgcggctacaaagtatcatctaaatggccgggactcgttggttaatccaggaccagctatggccagccacaaagacgatgaagaaaagtttttccccatgcatggaaccctgatatttggcaaacaaggaacaaatgctaacgacgcggatttggacaatgtcatgattacagatgaagaagaaatccgtaccaccaatcccgtggctacggagcagtacgggactgtgtcaaataatttgcaaaactcaaatactggtccaactactggaactgtcaatcaccaaggagcgttacctggtatggtgtggcaggatcgagacgtgtaccttcagggacccatttgggccaagattcctcacaccgatggacactttcacccttctccgctgatgggaggttttggactcaaacacccgcctcctcagatcatgatcaaaaacactcccgttccagccaatcctcccacaaacttcagttctgccaagtttgcttctttcatcacacagtattccacgggacaggttagcgtggagatcgagtgggagctgcagaaggagaacagcaaacgctggaaccccgagatccagtacacttccaactacaacaagtctgttaatgtggactttactgtggacactaatggtgtgtattcagagcctcgccccattggcaccagatacctgactcgtaatctgtaa

SEQ ID NO: 3751 - DNA, 2208 bp, Artificial Sequence
  source: /note="Description of Artificial Sequence: Synthetic polynucleotide"
atggctgccgatggttatcttccagattggctcgaggacattctctctgaaggaataagacagtggtggaagctcaaacctggcccaccaccaccaaagcccgcagagcggcataaggacgacagcaggggtcttgtgcttcctgggtacaagtacctcggacccttcaacggactcgacaaaggagagccggtcaacgaggcagacgccgcggccctcgagcacgacaaggcctacgaccggcagctcgacagcggagacaacccgtacctcaagtacaaccacgccgacgcggagtttcaggagcgtcttaaagaagatacgtcttttgggggcaacctcggacgagcagtcttccaggcaaaaaagagggttcttgaacctctgggcctggttgaggaacctgttaagacggctccgggaaaaaagaggccggtagagcaatctcctgcggagccagactcctcctcgggaaccggaaaggcgggcaaccagcctgcaagaaagagattgaattttggtcagactggagacgcagactccgtacctgacccccagcctctcggacagccaccagcagccccctctggtctgggatctactacaatggctacaggcagtggcgcaccaatggcagacaataacgagggtgccgatggagtgggtaattcctcaggaaattggcattgcgattcccaatggttgggcgacagagtcatcaccaccagcacccgaacctgggccctgcccacctacaacaatcacctctacaagcaaatctccagccaatcaggagccagcaacgacaaccactactttggctacagcaccccctgggggtattttgacttcaacagattccactgccacttttcaccacgtgactggcaaagactcatcaacaacaactggggattccgacccaaaagactcaacttcaagctctttaacattcaagtcaaagaggtcacgcagaatgacggtacgacgacgattgccaataaccttaccagcacggttcaggtgtttactgactcggagtaccagctcccgtacgtcctcggctcggcgcatcaaggatgcctcccgccgtttccagcggacgtcttcatggtcccacagtatggatacctcaccctgaacaacgggagtcaggcggtaggacgctcttccttttactgcctggagtactttccttctcagatgcttcgtaccggaaacaactttaccttcagttacacctttgaagacgttcctttccacagcagctacgctcacagtcaaagtctggaccggctgatgaatcctctgatagaccagtacctgtattatctaaacaaaacacaatcaaatagtggaactcttcagcagtctcggctactgtttagtcaagctggacccaccagcatgtctcttcaagctaaaaactggctgcctggaccttgctacagacaacagcgtctgtcaaagcaggcaaacgacaacaacaacagcaactttccctggactgcggctacaaagtatcatctaaatggccgggactcgttggttaatccaggaccagctatggccagccacaaagacgatgaagaaaagtttttccccatgcatggaaccctgatatttggtaaacaaggaacaaatgctaacgacgcggatttggacaatgtcatgattacagatgaagaagaaatccgcaccaccaatcccgtggctacggagcagtacgggactgtgtcaaataatttgcaaaactcaaatactggtccaactactggaactgtcaatcaccaaggagcgttacctggtatggtgtggcaggatcgagacgtgtaccttcagggacccatttgggccaagattcctcacaccgatggacactttcatccttctccactgatgggaggttttggactcaaacacccgcctcctcagatcatgatcaaaaacactcccgttccagtcaatcctcctacaaacttcagttctgccaagtttgcttctttcatcacacagtattccacggggcaggtcagcgtggagatagagtgggagctgcagaaggagaacagcaaacgctggaaccccgagatccagtatacttccaactacaacaagtctgttaatgtggactttactgtggacactaatggtgtgtattcagagcctcgccccattggcaccagatacctgactcgtaatctgtaa

SEQ ID NO: 3752 - DNA, 2208 bp, Artificial Sequence
  source: /note="Description of Artificial Sequence: Synthetic polynucleotide"
atggctgccgatggttatcttccagattggctcgaggacactctctctgaaggaataagacagtggtggaagctcaaacctggcccaccaccgccaaagcccgcagagcggcataaggacgacagcaggggtcttgtgcttcctgggtacaagtacctcggacccttcaacggactcgacaaaggagagccggtcaacgaggcagacgccgcggccctcgagcacgacaaggcctacgaccggcagctcgacagcggagacaacccgtacctcaagtacaaccacgccgacgcggagtttcaggagcgccttaaagaagatacgtcttttgggggcaacctcgcaagagcagtattccaggcgaaaaagagggttcttgaacctctgggcctggttgaggagcctgttaagacggctccgggaaaaaagaggccggtagagcactctcctgcggagccagattcctcctccggaactggaaagtcgggccaacagcctgcaagaaagagattgaattttggtcagactggagacgcagactccgtacctgacccccagcctctcggacagccaccagcagccccctctggtctgggatctactacaatggctacaggcagtggcgcaccaatggcagacaataacgagggtgccgatggagtgggtaattcctcaggaaattggcattgcgattcccaatggttgggcgacagagtcatcaccaccagcacccgaacctgggccctgcccacctacaacaatcacctctacaagcaaatctccagccaatcaggagccagcaacgacaaccactactttggctacagcaccccctgggggtattttgacttcaacagattccactgccacttttcaccacgtgactggcaaagactcatcaacaacaactggggattccgacccaaaagactcaacttcaagctctttaacattcaagtcaaagaggtcacgcagaatgacggtacgacgacgattgccaataaccttaccagcacggttcaggtgtttactgactcggagtaccagctcccgtacgtcctcggctcggcgcatcaaggatgcctcccgccgtttccagcggacgtcttcatggtcccacagtatggatacctcaccctgaacaacgggagtcaggcggtaggacgctcttccttttactgcctggagtactttccttctcagatgcttcgtaccggaaacaactttaccttcagttacacctttgaagacgttcctttccacagcagctacgctcacagtcaaagtctggaccggctgatgaatcctctgatagaccagtacctgtattatctaaacaaaacacaatcaaatagtggaactcttcagcagtctcggctactgtttagtcaagctggacccaccagcatgtctcttcaagctaaaaactggctgcctggaccttgctacagacaacagcgtctgtcaaagcaggcaaacgacaacaacaacagcaactttccctggactgcggctacaaagtatcatctaaatggccgggactcgttggttaatccaggaccagctatggccagccacaaagacgatgaagaaaagtttttccccatgcatggaaccctgatatttggtaaacaaggaacaaatgctaacgacgcggatttggacaatgtcatgattacagatgaagaagaaatccgcaccaccaatcccgtggctacggagcagtacgggactgtgtcaaataatttgcaaaactcaaatactggtccaactactggaactgtcaatcaccaaggagcgttacctggtatggtgtggcaggatcgagacgtgtaccttcagggacccatttgggccaagattcctcacaccgatggacactttcatccttctccactgatgggaggttttggactcaaacacccgcctcctcagatcatgatcaaaaacactcccgttccagccaatcctcctacaaacttcagttctgccaagtttgcttctttcatcacacagtattccacggggcaggtcagcgtggagatagagtgggagctgcagaaggagaacagcaaacgctggaaccccgagatccagtatacttccaactacaacaagtctgttaatgtggactttactgtggacactaatggtgtgtattcagagcctcgccccattggcaccagatacctgactcgtaatctgtaa

SEQ ID NO: 3753 - DNA, 2208 bp, Artificial Sequence
  source: /note="Description of Artificial Sequence: Synthetic polynucleotide"
atggctgccgatggttatcttccagattggctcgaggacattctctctgaaggaataagacagtggtggaagctcaaacctggcccaccaccaccaaagcccgcagagcggcataaggacgacagcaggggtcttgtgcttcctgggtacaagtacctcggacccttcaacggactcgacaaaggagagccggtcaacgaggcagacgccgcggccctcgagcacgacaaggcctacgaccggcagctcgacagcggagacaacccgtacctcaagtacaaccacgccgacgcggagtttcaggagcgtcttaaagaagatacgtcttttgggggcaacctcggacgagcagtcttccaggcaaaaaagagggttcttgaacctctgggcctggttgaggaacctgttaagacggctccgggaaaaaagaggccggtagagcaatctcctgcggagccagactcctcctcgggaaccggaaaggcgggcaaccagcctgcaagaaagagattgaattttggtcagactggagacgcagactccgtacctgacccccagcctctcggacagccaccagcagccccctctggtctgggatctactacaatggctacaggcagtggcgcaccaatggcagacaataacgagggtgccgatggagtgggtaattcctcaggaaattggcattgcgattcccaatggttgggcgacagagtcatcaccaccagcacccgaacctgggccctgcccacctacaacaatcacctctacaagcaaatctccagccaatcaggagccagcaacgacaaccactactttggctacagcaccccctgggggtattttgacttcaacagattccactgccacttttcaccacgtgactggcaaagactcatcaacaacaactggggattccgacccaaaagactcaacttcaagctctttaacattcaagtcaaagaggtcacgcagaatgacggtacgacgacgattgccaataaccttaccagcacggttcaggtgtttactgactcggagtaccagctcccgtacgtcctcggctcggcgcatcaaggatgcctcccgccgtttccagcggacgtcttcatggtcccacagtatggatacctcaccctgaacaacgggagtcaggcggtaggacgctcttccttttactgcctggagtactttccttctcagatgcttcgtaccggaaacaactttaccttcagttacacctttgaagacgttcctttccacagcagctacgctcacagtcaaagtctggaccggctgatgaatcctctgatagaccagtacctgtattatctaaacaaaacacaatcaaatagtggaactcttcagcagtctcggctactgtttagtcaagctggacccaccagcatgtctcttcaagctaaaaactggctgcctggaccttgctacagacaacagcgtctgtcaaagcaggcaaacgacaacaacaacagcaactttccctggactgcggctacaaagtatcatctaaatggccgggactcgttggttaatccaggaccagctatggccagccacaaagacgatgaagaaaagtttttccccatgcatggaaccctgatatttggtaaacaaggaacaaatgctaacgacgcggatttggacaatgtcatgattacagatgaagaagaaatccgcaccaccaatcccgtggctacggagcagtacgggactgtgtcaaataatttgcaaaactcaaatactggtccaactactggaactgtcaatcaccaaggagcgttacctggtatggtgtggcaggatcgagacgtgtaccttcagggacccatttgggccaagattcctcacaccgatggacactttcatccttccccactgatgggaggttttggactcaaacacccgcctcctcagatcatgatcaaaaacactcccgttccagccaatcctcctacaaacttcagttctgccaagtttgcttctttcatcacacagtattccacggggcaggtcagcgtggggatagagtgggagctgcagaaggagaacagcaaacgctggaaccccgagatccagtatacttccaactacaacaagtctgttaatgtggactttactgtggacactaatggtgtgtattcagagcctcgccccattggcaccagatacctgactcgtaatctgtaa

SEQ ID NO: 3754 - DNA, 2205 bp, Artificial Sequence
  source: /note="Description of Artificial Sequence: Synthetic polynucleotide"
atggctgccgatggttatcttccagattggctcgaggacattctctctgaaggaataagacagtggtggaagctcaaacctggcccaccaccaccaaagcccgcagagcggcataaggacgacagcaggggtcttgtgcttcctgggtacaagtacctcggacccttcaacggactcgacaaaggagagccggtcaacgaggcagacgccgcggccctcgagcacgacaaggcctacgaccggcagctcgacagcggagacaacccgtacctcaagtacaaccacgccgacgcggagtttcaggagcgtcttaaagaagatacgtcttttgggggcaacctcggacgagcagtcttccaggcaaaaaagagggttcttgaacctctgggcctggttgaggaacctgttaagacggctccgggaaaaaagaggccggtagagcaatctcctgcggagccagactcctcctcgggaaccggaaaggcgggcaaccagcctgcaagaaagagattgaattttggtcagactggagacgcagactccgtacctgacccccagcctctcggacagccaccagcagccccctctggtctgggatctactacaatggctacaggcagtggcgcaccaatggcagacaataacgagggtgccgatggagtgggtaattcctcaggaaattggcattgcgattcccaatggttgggcgacagagtcatcaccaccagcacccgaacctgggccctgcccacctacaacaatcacctctacaagcaaatctccagccaatcaggagccagcaacgacaaccactactttggctacagcaccccctgggggtattttgacttcaacagattccactgccacttttcaccacgtgactggcaaagactcatcaacaacaactggggattccgacccaaaagactcaacttcaagctctttaacattcaagtcaaagaggtcacgcagaatgacggtacgacgacgattgccaataaccttaccagcacggttcaggtgtttactgactcggagtaccagctcccgtacgtcctcggctcggcgcatcaaggatgcctcccgccgtttccagcggacgtcttcatggtcccacagtatggatacctcaccctgaacaacgggagtcaggcggtaggacgctcttccttttactgcctggagtactttccttctcagatgcttcgtaccggaaacaactttaccttcagttacacctttgaagacgttcctttccacagcagctacgctcacagtcaaagtctggaccggctgatgaatcctctgatagaccagtacctgtattatctaaacaaaacacaatcaaatagtggaactcttcagcagtctcggctactgtttagtcaagctggacccaccagcatgtctcttcaagctaaaaactggctgcctggaccttgctacagacaacagcgtctgtcaaagcaggcaaacgacaacaacagcaactttccctggactgcggctacaaagtatcatctaaatggccgggactcgttggttaatccaggaccagctatggccagccacaaagacgatgaagaaaagtttttccccatgcatggaaccctgatatttggtaaacaaggaacaaatgctaacgacgcggatttggacaatgtcatgattacagatgaagaagaaatccgcaccaccaatcccgtggctacggagcagtacgggactgtgtcaaataatttgcaaaactcaaatactggtccaactactggaactgtcaatcaccaaggagcgttacctggtatggtgtggcaggatcgagacgtgtaccttcagggacccatttgggccaagattcctcacaccgatggacactttcatccttctccactgatgggaggttttggactcaaacacccgcctcctcagatcatgatcaaaaacactcccgttccagccaatcctcctacaaacttcagttctgccaagtttgcttctttcatcacacagtattccacggggcaggtcagcgtggagatagagtgggagctgcagaaggagaacagcaaacgctggaaccccgagatccagtatacttccaactacaacaagtctgttaatgtggactttactgtggacactaatggtgtgtattcagagcctcgccccattggcaccagatacctgactcgtaatctgtaa

SEQ ID NO: 3755 - DNA, 2208 bp, Artificial Sequence
  source: /note="Description of Artificial Sequence: Synthetic polynucleotide"
atggctgccgatggttatcttccagattggctcgaggacactctctctgaaggaataagacagtggtggaagctcaaacctggcccaccaccgccaaagcccgcagagcggcataaggacgacagcaggggtcttgtgcttcctgggtataagtacctcggacccttcaacggactcgacaagggagagccggtcaacgaggcagacgccgcggccctcgagcacgacaaggcctacgaccggcagctcgacagcggagacaacccgtacctcaagtacaaccacgccgacgcggagtttcaggagcgccttaaagaagatacgtcttttgggggcaacctcggacgagcagtattccaggcgaaaaagagggttcttgaacctctgggcctggttgtggagcctgttaagacggctccgggaaaaaagaggccggtagagcactctcctgtggagccagactcctcctcgggaaccggaaaagcgggccagcagcctgcgagaaagagattgaattttgatcagactggaggcgcagactccgtacctgacccccagcctctcggacagccaccagcagcccccacaagtttgggatctactacaatggctacaggcagtggcgcaccaatggcagacaataacgagggtgccgatggagtgggtaattcctcaggaaattggcattgcgattcccaatggtcgggcgacagagtcatcaccaccagcacccgaacctgggccctgcccacctacaacaaccacctctacaagcaaatctccagccgatcaggagccagcaacgacaaccactactttggctacagcaccccctgggggtattttgacttcaacggattccactgccacttttcaccacgtgactggcaaagactcatcaacaacaactggggattccgacccaagagactcaacttcaagctctttaacattcaagtcaaagaggtcacgcagaatgacggtacgacgacgattgccaataaccttaccagcacggttcaggtgtttactgactcggagtaccagctcccgcacgtcctcggctcggcgcatcaaggatgcctcccgccgtttccagcggacgtcttcatggtcccacagtatggatacctcaccctgaacaacgggagtcaggcggtaggacgctcttccttttactgcccggggtactttccttctcagatgcttcgtaccggaaacaactttaccttcagttacacctttgaagacgttcctttccacagcagctacgctcacagtcaaagtctggaccggctgatgaatcctcttatcgaccagtacctgtattatctaaacaaaacacaatcaaatagtggaactcttcagcagtctcggctactgtttagtcaagctggacctaccagcatgtctcttcaagctaaaaactggctgcctggaccttgctacagacaacagcgtctgtcaaagcaggcaaacggcaacaacaacagcaactttccctggactgcggctacaaagtatcatctaaatggccgggactcgttggttaatccaggaccagctatggccagccacaaagacgatgaagaaaagtttttccccatgcatggaaccctgatatttggcaaacaaggaacaaatgctaacgacgcggatttggacaatgtcatgattacagatgaagaagaaatccgtaccaccaatcccgtggctacggagcagtacgggactgtgtcaaataatttgcaaaactcaaatactggtccaactactggaactgtcaatcaccaaggagcgttacctggtatggtgtggcaggatcgagacgtgtaccttcagggacccatttgggccaagattcctcacaccgatggacactttcacccttctccgctgatgggaggttttggactcaaacacccgcctcctcagatcatgatcaaaaacactcccgttccagccaatcctcccacaaacttcagttctgccaagtttgcttctttcatcacacagtattccacgggacaggttagcgtggagatcgagtgggagctgcagaaggagaacagcaaacgctggaaccccgagatccagtacacttccaactacaacaagtctgttaatgtggactttactgtggacactaatggtgtgtattcagagcctcgccccattggcaccagatacctgactcgtaatctgtaa

SEQ ID NO: 3756 - DNA, 2205 bp, Artificial Sequence
  source: /note="Description of Artificial Sequence: Synthetic polynucleotide"
atggctgccgatggttatcttccagattggctcgaggacactctctctgaaggaataagacagtggtggaagctcaaacctggcccaccaccgccaaagcccgcagagcggcataaggacgacagcaggggtcttgtgcttcctgggtacaagtacctcggacccttcaacggactcgacaagggagagccggtcaacgaggcagacgccgcggccctcgagcacgacaaggcctacgaccggcagctcgacagcggagacaacccgtacctcaagtacaaccacgccgacgcggagtttcaggagcgccttaaagaagatacgtcttttgggggcaacctcggacgagcagtattccaggcgaaaaagagggttcttgaacctctgggcctggttgaggagcctgttaagacggctccgggaaaaaagaggccggtagagcactctcctgtggagccagactcctcctcgggaaccggaaaagcgggccagcagcctgcgagaaagagattgaattttggtcagactggagacgcagactccgtacctgacccccagcctctcggacagccaccagcagcccccacaagtttgggatctactacaatggctacaggcagtggcgcaccaatggcagacaataacgagggtgccgatggagtgggtaattcctcaggaaattggcattgcgattcccaatggtcgggcgacagagtcatcaccaccagcacccgaacctgggccctgcccacctacaacaaccacctctacaagcaaatctccagccaatcaggagccagcaacgacaaccactactttggctacagcaccccctgggggtattttgacttcaacagattccactgccacttttcaccacgtgactggcaaagactcatcaacaacaactggggattccgacccaagagactcaacttcaagctctttaacattcaagtcaaagaggtcacgcagaatgacggtacgacgacgattgccaataaccttaccagcacggttcaggtgtttactgactcggagtaccagctcccgtacgtcctcggctcggcgcatcaaggatgcctcccgccgtttccagcggacgtcttcatggtcccacagtatggatacctcaccctgaacaacgggagtcaggcggtaggacgctcttccttttactgcctggagtactttccttctcagatgcttcgtaccggaaacaactttaccttcagttacacctttgaagacgttcctttccacagcagctacgctcacagtcaaagtctggaccggctgatgaatcctcttatcgaccagtacctgtattatctaaacaaaacacaatcaaatagtggaactcttcagcagtctcggctactgtttagtcaagctggacctaccagcatgtctcttcaagctaaaaactggctgcctggaccttgctacagacaacagcgtctgtcaaagcaggcaaacgacaacaacagcaactttccctggactgcggctacaaagtatcatctaaatggccgggactcgttggttaatccaggaccagctatggccagccacaaagacgatgaagaaaagtttttccccatgcatggaaccctgatatttggcaaacaaggaacaaatgctaacgacgcggatttggacaatgtcatgattacagatgaagaagaaatccgtaccaccaatcccgtggctacggagcagtacgggactgtgtcaaataatttgcaaaactcaaatactggtccaactactggaactgtcaatcaccaaggagcgttacctggtatggtgtggcaggatcgagacgtgtaccttcagggacccatttgggccaagattcctcacaccgatggacactttcacccttctccgctgatgggaggttttggactcaaacacccgcctcctcagatcatgatcaaaaacactcccgttccagccaatcctcccacaaacttcagttctgccaagtttgcttctttcatcacacagtattccacgggacaggttagcgtggagatcgagtgggagctgcagaaggagaacagcaaacgctggaaccccgagatccagtacacttccaactacaacaagtctgttaatgtggactttactgtggacactaatggtgtgtattcagagcctcgccccattggcaccagatacctgactcgtaatctgtaa

SEQ ID NO: 3757 - DNA, 2208 bp, Artificial Sequence
  source: /note="Description of Artificial Sequence: Synthetic polynucleotide"
atggctgccgatggttatcttccagattggctcgaggacattctctctgaaggaataagacagtggtggaagctcaaacctggcccaccaccaccaaagcccgcagagcggcataaggacgacagcaggggtcttgtgcttcctgggtacaagtacctcggacccttcaacggactcgacaaaggagagccggtcaacgaggcagacgccgcggccctcgagcacgacaaggcctacgaccggcagctcgacagcggagacaacccgtacctcaagtacaaccacgccgacgcggagtttcaggagcgtcttaaagaagatacgtcttttgggggcaacctcggacgagcagtcttccaggcaaaaaagagggttcttgaacctctgggcctggttgaggaacctgttaagacggctccgggaaaaaagaggccggtagagcaatctcctgcggagccagactcctcctcgggaaccggaaaggcgggcaaccagcctgcaagaaagagattgaattttggtcagactggagacgcagactccgtacctgacccccagcctctcggacagccaccagcagccccctctggtctgggatctactacaatggctacaggcagtggcgcaccaatggcagacaataacgagggtgccgatggagtgggtaattcctcaggaaattggcattgcgattcccaatggttgggcgacagagtcatcaccaccagcacccgaacctgggccctgcccacctacaacaatcacctctacaagcaaatctccagccaatcaggagccagcaacgacaaccactactttggctacagcaccccctgggggtattttgacttcaacagattccactgccacttttcaccacgtgactggcaaagactcatcaacaacaactggggattccgacccaaaagactcaacttcaagctctttaacattcaagtcaaagaggtcacgcagaatgacggtacgacgacgattgccaataaccttaccagcacggttcaggtgtttactgactcggagtaccagctcccgtacgtcctcggctcggcgcatcaaggatgcctcccgccgtttccagcggacgtcttcatggtcccacagtatggatacctcaccctgaacaacgggagtcaggcggtaggacgctcttccttttactgcctggagtactttccttctcagatgcttcgtaccggaaacaactttaccttcagttacacctttgaagacgttcctttccacagcagctacgctcacagtcaaagtctggaccggctgatgaatcctctgatagaccagtacctgtattatctaaacaaaacacaatcaaatagtggaactcttcagcagtctcggctactgtttagtcaagctggacccaccagcatgtctcttcaagctaaaaactggctgcctggaccttgctacagacaacagcgtctgtcaaagcaggcaaacgacaacaacaacagcaactttccctggactgcggctacaaagtatcatctaaatggccgggactcgttggttaatccaggaccagctatggccagccacaaagacgatgaagaaaagtttttccccatgcatggaaccctgatatttggtaaacaaggaacaaatgctaacgacgcggatttggacaatgtcatgattacagatgaagaagaaatccgcaccaccaatcccgtggctacggagcagtacgggactgtgtcaaataatttgcaaaactcaaatactggtccaactactggaactgtcaatcaccaaggagcgttacctggtatggtgtggcaggatcgagacgtgtaccttcagggacccatttgggccaagattcctcacaccgatggacactttcatccttccccactgatgggaggttttggactcaaacacccgcctcctcagatcatgatcaaaaacactcccgttccagccaatcctcctacaaacttcagttctgccaagtttgcttctttcatcacacagtattccacggggcaggtcagcgtggggatagagtgggtgctgcagaaggagaacagcaaacgctggaaccccgagatccagtatacttccaactacaacaagtctgttaatgtggactttactgtggacactaatggtgtgtattcagagcctcgccccattggcaccagatacctgactcgtaatctgtaa

SEQ ID NO: 3758 - DNA, 2208 bp, Artificial Sequence
  source: /note="Description of Artificial Sequence: Synthetic polynucleotide"
atggctgccgatggttatcttccagattggctcgaggacactctctctgaaggaataagacagtggtggaagctcaaacctggcccaccaccgccaaagcccgcagagcggcataaggacgacagcaggggtcttgtgcttcctgggtacaagtacctcggacccttcaacggactcgacaaaggagagccggtcaacgaggcagacgccgcggccctcgagcacgacaaggcctacgaccggcagctcgacagcggagacaacccgtacctcaagtacaaccacgccgacgcggagtttcaggagcgccttaaagaagatacgtcttttgggggcaacctcgcaagagcagtattccaggcgaaaaagagggttcttgaacctctgggcctggttgaggagcctgttaagacggctccgggaaaaaagaggccggtagagcaatctcctgcggagccagactcctcctcgggaaccggaaaggcgggcaaccagcctgcaagaaagagattgaattttggtcagactggagacgcagactccgtacctgacccccagcctctcggacagccaccagcagccccctctggtctgggatctactacaatggctacaggcagtggcgcaccaatggcagacaataacgagggtgccgatggagtgggtaattcctcaggaaattggcattgcgattcccaatggttgggcgacagagtcatcaccaccagcacccgaacctgggccctgcccacctacaacaatcacctctacaagcaaatctccagccaatcaggagccagcaacgacaaccactactttggctacagcaccccctgggggtattttgacttcaacagattccactgccacttttcaccacgtgactggcaaagactcatcaacaacaactggggattccgacccaaaagactcaacttcaagctctttaacattcaagtcaaagaggtcacgcagaatgacggtacgacgacgattgccaataaccttaccagcacggttcaggtgtttactgactcggagtaccagctcccgtacgtcctcggctcggcgcatcaaggatgcctcccgccgtttccagcggacgtcttcatggtcccacagtatggatacctcaccctgaacaacgggagtcaggcggtaggacgctcttccttttactgcctggagtactttccttctcagatgcttcgtaccggaaacaactttaccttcagttacacctttgaagacgttcctttccacagcagctacgctcacagtcaaagtctggaccggctgatgaatcctctgatagaccagtacctgtattatctaaacaaaacacaatcaaatagtggaactcttcagcagtctcggctactgtttagtcaagctggacccaccagcatgtctcttcaagctaaaaactggctgcctggaccttgctacagacaacagcgtctgtcaaagcaggcaaacgacaacaacaacagcaactttccctggactgcggctacaaagtatcatctaaatggccgggactcgttggttaatccaggaccagctatggccagccacaaagacgatgaagaaaagtttttccccatgcatggaaccctgatatttggtaaacaaggaacaaatgctaacgacgcggatttggacaatgtcatgattacagatgaagaagaaatccgcaccaccaatcccgtggctacggagcagtacgggactgtgtcaaataatttgcaaaactcaaatactggtccaactactggaactgtcaatcaccaaggagcgttacctggtatggtgtggcaggatcgagacgtgtaccttcagggacccatttgggccaagattcctcacaccgatggacactttcatccttctccactgatgggaggttttggactcaaacacccgcctcctcagatcatgatcaaaaacactcccgttccagccaatcctcctacaaacttcagttctgccaagtttgcttctttcatcacacagtattccacggggcaggtcagcgtggagatagagtgggagctgcagaaggagaacagcaaacgctggaaccccgagatccagtatacttccaactacaacaagtctgttaatgtggactttactgtggacactaatggtgtgtattcagagcctcgccccattggcaccagatacctgactcgtaatctgtaa

SEQ ID NO: 3759 - DNA, 2208 bp, Artificial Sequence
  source: /note="Description of Artificial Sequence: Synthetic polynucleotide"
atggctgccgatggttatcttccagattggctcgaggacattctctctgaaggaataagacagtggtggaagctcaaacctggcccaccaccaccaaagcccgcagagcggcataaggacgacagcaggggtcttgtgcttcctgggtacaagtacctcggacccttcaacggactcgacaaaggagagccggtcaacgaggcagacgccgcggccctcgagcacgacaaggcctacgaccggcagctcgacagcggagacaacccgtacctcaagtacaaccacgccgacgcggagtttcaggagcgtcttaaagaagatacgtcttttgggggcaacctcggacgagcagtcttccaggcaaaaaagagggttcttgaacctctgggcctggttgaggaacctgttaagacggctccgggaaaaaagaggccggtagagcaatctcctgcggagccagactcctcctcgggagccggaaaggcgggcaaccagcctgcaagaaagagattgaattttggtcagactggagacgcagactccgtacctgacccccagcctctcggacagccaccagcagccccctctggtctgggatctactacaatggctacaggcagtggcgcaccaatggcagacaataacgagggtgccgatggagtgggtaattcctcaggaaattggcattgcgattcccaatggttgggcgacagagtcatcaccaccagcacccgaacctgggccctgcccacctacaacaatcacctctacaagcaaatctccagccaatcaggagccagcaacgacaaccactactttggctacagcaccccctgggggtattttgacttcaacagattccactgccacttttcaccacgtgactggcaaagactcatcaacaacaactggggattccgacccaaaagactcaacttcaagctctttaacattcaagtcaaagaggtcacgcagaatgacggtacgacgacgattgccaataaccttaccagcacggttcaggtgtttactgactcggagtaccagctcccgtacgtcctcggctcggcgcatcaaggatgcctcccgccgtttccagcggacgtcttcatggtcccacagtatggatacctcaccctgaacaacgggagtcaggcggtaggacgctcttccttttactgcctggagtactttccttctcagatgcttcgtaccggaaacaactttaccttcagttacacctttgaagacgttcctttccacagcagctacgctcacagtcaaagtctggaccggctgatgaatcctctgatagaccagtacctgtattatctaaacaaaacacaatcaaatagtggaactcttcagcagtctcggctactgtttagtcaagctggacccaccagcatgtctcttcaagctaaaaactggctgcctggaccttgctacagacaacagcgtctgtcaaagcaggcaaacgacaacaacaacagcaactttccctggactgcggctacaaagtatcatctaaatggccgggactcgttggttaatccaggaccagctatggccagccacaaagacgatgaagaaaagtttttccccatgcatggaaccctgatatttggtaaacaaggaacaaatgctaacgacgcggatttggacaatgtcatgattacagatgaagaagaaatccgcaccaccaatcccgtggctacggagcagtacgggactgtgtcaaataatttgcaaaactcaaatactggtccaactactggaactgtcaatcaccaaggagcgttacctggtatggtgtggcaggatcgagacgtgtaccttcagggacccatttgggccaagattcctcacaccgatggacactttcatccttctccactgatgggaggttttggactcaaacacccgcctcctcagatcatgatcaaaaacactcccgttccagccaatcctcctacaaacttcagttctgccaagtttgcttctttcatcacacagtattccacggggcaggtcagcgtggagatagagtgggagctgcagaaggagaacagcaaacgctggaaccccgagatccagtatacttccaactacaacaagtctgttaatgtggactttactgtggacactaatggtgtgtattcagagcctcgccccattggcaccagatacctgactcgtaatctgtaa

SEQ ID NO: 3760 - DNA, 2208 bp, Artificial Sequence
  source: /note="Description of Artificial Sequence: Synthetic polynucleotide"
atggctgccgatggttatcttccagattggctcaaggacattctctctgaaggaataagacagtggtggaagctcaaacctggcccaccaccaccaaagcccgcagagcggcataaggacgacagcaggggtcttgtgcttcctgggtacaagtacctcggacccttcaacggactcgacaaaggagagccggtcaacgaggcagacgccgcggccctcgagcacgacaaggcctacgaccggcagctcgacagcggagacaacccgtacctcaagtacaaccacgccgacgcggagtttcaggagcgtcttaaagaagatacgtcttttgggggcaacctcggacgagcagtcttccaggcaaaaaagagggttcttgaacctctgggcctggttgaggaacctgttaagacggctccgggaaaaaagaggccggtagagcaatctcctgcggagccagactcctcctcgggaaccggaaaggcgggcaaccagcctgcaagaaagagattgaattttggtcagactggagacgcagactccgtacctgacccccagcctctcggacagccaccagcagccccctctggtctgggatctactacaatggctacaggcagtggcgcaccaatggcagacaataacgagggtgccgatggagtgggtaattcctcaggaaattggcatcgcgattcccaatggttgggcgacagagtcatcaccaccagcacccgaacctgggccctgcccacctacaacaatcacctctacaagcaaatctccagccaatcaggagccagcaacgacaaccactactttggctacagcaccccctgggggtattttgacttcaacagattccactgccacttttcaccacgtgactggcaaagactcatcaacaacaactggggattccgacccaaaagactcaacttcaagctctttaacattcaagtcaaagaggtcacgcagaatgacggtacgacgacgattgccaataaccttaccagcacggttcaggtgtttactgactcggagtaccagctcccgtacgtcctcggctcggcgcatcaaggatgcctcccgccgtttccagcggacgtcttcatggtcccacagtatggatacctcaccctgaacaacgggagtcaggcggtaggacgctcttccttttactgcctggagtactttccttctcagatgcttcgtaccggaaacaactttaccttcagttacacctttgaagacgttcctttccacagcagctacgctcacagtcaaagtctggaccggctgatgaatcctctgatagaccagtacctgtattatctaaacaaaacacaatcaaatagtggaactcttcagcagtctcggctactgtttagtcaagctggacccaccagcatgtctcttcaagctaaaaactggctgcctggaccttgctacagacaacagcgtctgtcaaagcaggcaaacgacaacaacaacagcaactttccctggactgcggctacaaagtatcatctaaatggccgggactcgttggttaatccaggaccagctatggccagccacaaagacgatgaagaaaagtttttccccatgcatggaaccctgatatttggtaaacaaggaacaaatgctaacgacgcggatttggacaatgtcatgattacagatgaagaagaaatccgcaccaccaatcccgtggctacggagcagtacgggactgtgtcaaataatttgcaaaactcaaatactggtccaactactggaactgtcaatcaccaaggagcgttacctggtatggtgtggcaggatcgagacgtgtaccttcagggacccatttgggccaagattcctcacaccgatggacactttcatccttctccactgatgggaggttttggactcaaacacccgcctcctcagatcatgatcaaaaacactcccgttccagtcaatcctcctacaaacttcagttctgccaagtttgcttctttcatcacacagtattccacggggcaggtcagcgtggagatagagtgggagctgcagaaggagaacagcaaacgctggaaccccgagatccagtatacttccaactacaacaagtctgttaatgtggactttactgtggacactaatggtgtgtattcagagcctcgccccattggcaccagatacctgactcgtaatctgtaa

SEQ ID NO: 3761 - DNA, 2208 bp, Artificial Sequence
  source: /note="Description of Artificial Sequence: Synthetic polynucleotide"
atggctgccgatggttatcttccagattggctcgaggacattctctctgaaggaataagacggtggtggaagctcaaacctggcccaccaccaccaaagcccgcagagcggcataaggacgacagcaggggtcttgtgcttcctgggtacaagtacctcggacccttcaacggactcgacaaaggagagccggtcaacgaggcagacgccgcggccctcgagcacgacaaggcctacgaccggcagctcgacagcggagacaacccgtacctcaagtacaaccacgccgacgcagagtttcaggagcgtcttaaagaagatacgtcttttgggggcaacctcggacgagcagtcttccaggcaaaaaagagggttcttgaacctctgggcctggttgaggaacctgttaagacggctccgggaaaaaagaggccggtagagcaatctcctgcggagccagactcctcctcgggaaccggaaaggcgggcaaccagcctgcaagaaagagattgaattttggtcagactggagacgcagactccgtacctgacccccagcctctcggacagccaccagcagccccctctggtctgggatctactacaatggctacaggcagtggcgcaccaatggcagacaataacgagggtgccgatggagtgggtaattcctcaggaaattggcattgcgattcccaatggttgggcgacagagtcatcaccaccagcacccgaacctgggccctgcccacctacaacaatcacctctacaagcaaatctccagccaatcaggagccagcaacgacaaccactactttggctacagcaccccctgggggtattttgacttcaacagattccactgccacttttcaccacgtgactggcaaagactcatcaacaacaactggggattccgacccaaaagactcaacttcaagctctttaacattcaagtcaaagaggtcacgcagaatgacggtacgacgacgattgccaataaccttaccagcacggttcaggtgtttactgactcggagtaccagctcccgtacgtcctcggctcggcgcatcaaggatgcctcccgccgtttccagcggacgtcttcatggtcccacagtatggatacctcaccctgaacaacgggagtcaggcggtaggacgctcttccttttactgcctggagtactttccttctcagatgcttcgtaccggaaacaactttaccttcagttacacctttgaagacgttcctttccacagcagctacgctcacagtcaaagtctggaccggctgatgaatcctctgatagaccagtacctgtattatctaaacaaaacacaatcaaatagtggaactcttcagcagtctcggctactgtttagtcaagctggacccaccagcatgtctcttcaagctaaaaactggctgcctggaccttgctacagacaacagcgtctgtcaaagcaggcaaacgacaacaacaacagcaactttccctggactgcggctacaaagtatcatctaaatggccgggactcgttggttaatccaggaccagctatggccagccacaaagacgatgaagaaaagtttttccccatgcatggaaccctgatatttggtaaacaaggaacaaatgctaacgacgcggatttggacaatgtcatgattacagatgaagaagaaatccgcaccaccaatcccgtggctacggagcggtacgggactgtgtcaaataatttgcaaaactcaaatactggtccaactactggaactgtcaatcaccaaggagcgttacctggtatggtgtggcaggatcgagacgtgtaccttcagggacccatttgggccaagattcctcacaccgatggacactttcatccttctccactgatgggaggttttggactcaaacacccgcctcctcagatcatgatcaaaaacactcccgttccagccaatcctcctacaaacttcagttctgccaagtttgcttctttcatcacacagtattccacggggcaggtcagcgtggagatagagtgggagctgcagaaggagaacagcaaacgctggaaccccgagatccagtatacttccaactacaacaagtctgttaatgtggactttactgtggacactaatggtgtgtattcagagcctcgccccattggcaccagatacctgactcgtaatctgtaa

SEQ ID NO: 3762 - DNA, 2208 bp, Artificial Sequence
  source: /note="Description of Artificial Sequence: Synthetic polynucleotide"
atggctgccgatggttatcttccagattggctcgaggacactctctctgaaggaataagacagtggtggaagctcaaacctggcccaccaccgccaaagcccgcagagcggcataaggacgacagcaggggtcttgtgcttcctgggtacaagtacctcggacccttcaacggactcgacaaaggagagccggtcaacgaggcagacgccgcggccctcgagcacgacaaggcctacgaccggcagctcgacagcggagacaacccgtacctcaagtacaaccacgccgacgcggagtttcaggagcgccttaaagaagatacgtcttttgggggcaacctcgcaagagcagtattccaggcgaaaaagagggttcttgaacctctgggcctggttgaggagcctgttaagacggctccgggaaaaaagaggccggtagagcactctcctgcggagccagattcctcctccggaactggaaagtcgggccaacagcctgcaagaaagagattgaattttggtcagactggagacgcagactccgtacctgacccccagcctctcggacagccaccagcagccccctctggtctgggaactaatacgatggcttcaggcagtggcgcaccaatggcagacaataacgagggcgccgacggagtgggtaattcctcaggaaattggcattgcgattcccaatggttgggcgacagagtcatcaccaccagcacccgaacctgggccctgcccacctacaacaatcacctctacaagcaaatctccagccaatcaggagccagcaacgacaaccactactttggctacagcaccccctgggggtattttgacttcaacagattccactgccacttttcaccacgtgactggcaaagactcatcaacaacaactggggattccgacccaaaagactcaacttcaagctctttaacattcaagtcaaagaggtcacgcagaatgacggtacgacgacgattgccaataaccttaccagcacggttcaggtgtttactgactcggagtaccagctcccgtacgtcctcggctcggcgcatcaaggatgcctcccgccgtttccagcggacgtcttcatggtcccacagtatggatacctcaccctgaacaacgggagtcaggcggtaggacgctcttccttttactgcctggagtactttccttctcagatgcttcgtaccggaaacaactttaccttcagttacacctttgaagacgttcctttccacagcagctacgctcacagtcaaagtctggaccggctgatgaatcctctgatagaccagtacctgtattatctaaacaaaacacaatcaaatagtggaactcttcagcagtctcggctactgtttagtcaagctggacccaccagcatgtctcttcaagctaaaaactggctgcctggaccttgctacagacaacagcgtctgtcaaagcaggcaaacgacaacaacaacagcaactttccctggactgcggctacaaagtatcatctaaatggccgggactcgttggttaatccaggaccagctatggccagccacaaagacgatgaagaaaagtttttccccatgcatggaaccctgatatttggtaaacaaggaacaaatgctaacgacgcggatttggacaatgtcatgattacagatgaagaagaaatccgcaccaccaatcccgtggctacggagcagtacgggactgtgtcaaataatttgcaaaactcaaatactggtccaactactggaactgtcaatcaccaaggagcgttacctggtatggtgtggcaggatcgagacgtgtaccttcagggacccatttgggccaagattcctcacaccgatggacactttcatccttctccactgatgggaggttttggactcaaacacccgcctcctcagatcatgatcaaaaacactcccgttccagccaatcctcctacaaacttcagttctgccaagtttgcttctttcatcacacagtattccacggggcaggtcagcgtggagatagagtgggagctgcagaaggagaacagcaaacgctggaaccccgagatccagtatacttccaactacaacaagtctgttaatgtggactttactgtggacactaatggtgtgtattcagagcctcgccccattggcaccagatacctgactcgtaatctgtaa

SEQ ID NO: 3763 - DNA, 2208 bp, Artificial Sequence
  source: /note="Description of Artificial Sequence: Synthetic polynucleotide"
atggctgccgatggttatcttccagattggctcgaggacactctctctgaaggaataagacagtggtggaagctcaaacctggcccaccaccgccaaagcccgcagagcggcataaggacgacagcaggggtcttgtgcttcctgggtacaagtacctcggacccttcaacggactcgacaaaggagagccggtcaacgaggcagacgccgcggccctcgagcacgacaaggcctacgaccggcagctcgacagcggagacaacccgtacctcaagtacaaccacgccgacgcggagtttcaggagcgccttaaagaagatacgtcttttgggggcaacctcgcaagagcagtattccaggcgaaaaagagggttcttgaacctctgggcctggttgaggagcctgttaagacggctccgggaaaaaagaggccggtagagcactctcctgcggagccagattcctcctccggaactggaaagtcgggccaacagcctgcaagaaagagattgaattttggtcagactggagacgcagactccgtacctgacccccagcctctcggacagccaccagcagccccctctggtctgggaactaatacgatggcttcaggcagtggcgcaccaatggcagacaataacgagggcgccgacggagtgggtaattcctcgggaaattggcattgcgattccacatggatgggcgacagagtcatcaccaccagcacccgcacctgggctctgcccacctacaacaaccatctgtacaagcaaatttccagccagtctggagccagcaacgacaaccactacttcggctacagcacccccttggggtattttgacttcaacagattccactgccacttctccccacgtgactggcaaagactcatcaacaacaattggggattccggcccaaaagactcaacttcaagctctttaacattcaagtcaaagaggtcacgcagaatgacggtacgacgacgattgccaataaccttaccagcacggttcaggtgtttactgactcggagtaccagctcccgtacgtcctcggctcggcgcatcaaggatgcctcccgccgtttccagcggacgtcttcatggtcccacagtatggatacctcaccctgaacaacgggagtcaggcggtaggacgctcttccttttactgcctggagtactttccttctcagatgcttcgtaccggaaacaactttaccttcagttacacctttgaagacgttcctttccacagcagctacgctcacagtcaaagtctggaccggctgatgaatcctctgatagaccagtacctgtattatctaaacaaaacacaatcaaatagtggaactcttcagcagtctcggctactgtttagtcaagctggacccaccagcatgtctcttcaagctaaaaactggctgcctggaccttgctacagacaacagcgtctgtcaaagcaggcaaacgacaacaacaacagcaactttccctggactgcggctacaaagtatcatctaaatggccgggactcgttggttaatccaggaccagctatggccagccacaaagacgatgaagaaaagtttttccccatgcatggaaccctgatatttggtaaacaaggaacaaatgctaacgacgcggatttggacaatgtcatgattacagatgaagaagaaatccgcaccaccaatcccgtggctacggagcagtacgggactgtgtcaaataatttgcaaaactcaaatactggtccaactactggaactgtcaatcaccaaggagcgttacctggtatggtgtggcaggatcgagacgtgtaccttcagggacccatttgggccaagattcctcacaccgatggacactttcatccttctccactgatgggaggttttggactcaaacacccgcctcctcagatcatgatcaaaaacactcccgttccagccaatcctcctacaaacttcagttctgccaagtttgcttctttcatcacacagtattccacggggcaggtcagcgtggagatagagtgggagctgcagaaggagaacagcaaacgctggaaccccgagatccagtatacttccaactacaacaagtctgttaatgtggactttactgtggacactaatggtgtgtattcagagcctcgccccattggcaccagatacctgactcgtaatctgtaa

SEQ ID NO: 3764 - DNA, 2208 bp, Artificial Sequence
  source: /note="Description of Artificial Sequence: Synthetic polynucleotide"
atggctgccgatggttatcttccagattggctcgaggacactctctctgaaggaataagacagtggtggaagctcaaacctggcccaccaccgccaaagcccgcagagcggcataaggacgacagcaggggtcttgtgcttcctgggtacaagtacctcggacccttcaacggactcgacaaaggagagccggtcaacgaggcagacgccgcggccctcgagcacgacaaggcctacgaccggcagctcgacagcggagacaacccgtacctcaagtacaaccacgccgacgcggagtttcaggagcgccttaaagaagatacgtcttttgggggcaacctcgcaagagcagtattccaggcgaaaaagagggttcttgaacctctgggcctggttgaggagcctgttaagacggctccgggaaaaaagaggccggtagagcactctcctgcggagccagattcctcctccggaactggaaagtcgggccaacagcctgcaagaaagagattgaattttggtcagactggagacgcagactccgtacctgacccccagcctctcggacagccaccagcagccccctctggtctgggaactaatacgatggcttcaggcagtggcgcaccaatggcagacaataacgagggcgccgacggagtgggtaattcctcgggaaattggcattgcgattccacatggatgggcgacagagtcatcaccaccagcacccgcacctgggctctgcccacctacaacaaccatctgtacaagcaaatttccagccagtctggagccagcaacgacaaccactacttcggctacagcaccccttgggggtattttgacttcaacagattccactgccacttctccccacgtgactggcaaagactcatcaacaacaactggggattccgacccaaaagactcaacttcaagctctttaacattcaagtcaaagaggtcacgcagaatgacggtacgacgacgattgccaataaccttaccagcacggttcaggtgtttactgactcggagtaccagctcccgtacgtcctcggctcggcgcatcaaggatgcctcccgccgtttccagcggacgtcttcatggtcccacagtatggatacctcaccctgaacaacgggagtcaggcggtaggacgctcttccttttactgcctggagtactttccttctcagatgcttcgtaccggaaacaactttaccttcagttacacctttgaagacgttcctttccacagcagctacgctcacagtcaaagtctggaccggctgatgaatcctctgatagaccagtacctgtattatctaaacaaaacacaatcaaatagtggaactcttcagcagtctcggctactgtttagtcaagctggacccaccagcatgtctcttcaagctaaaaactggctgcctggaccttgctacagacaacagcgtctgtcaaagcaggcaaacgacaacaacaacagcaactttccctggactgcggctacaaagtatcatctaaatggccgggactcgttggttaatccaggaccagctatggccagccacaaagacgatgaagaaaagtttttccccatgcatggaaccctgatatttggtaaacaaggaacaaatgctaacgacgcggatttggacaatgtcatgattacagatgaagaagaaatccgcaccaccaatcccgtggctacggagcagtacgggactgtgtcaaataatttgcaaaactcaaatactggtccaactactggaactgtcaatcaccaaggagcgttacctggtatggtgtggcaggatcgagacgtgtaccttcagggacccatttgggccaagattcctcacaccgatggacactttcatccttctccactgatgggaggttttggactcaaacacccgcctcctcagatcatgatcaaaaacactcccgttccagccaatcctcctacaaacttcagttctgccaagtttgcttctttcatcacacagtattccacggggcaggtcagcgtggagatagagtgggagctgcagaaggagaacagcaaacgctggaaccccgagatccagtatacttccaactacaacaagtctgttaatgtggactttactgtggacactaatggtgtgtattcagagcctcgccccattggcaccagatacctgactcgtaatctgtaa

SEQ ID NO: 3765 - DNA, 2208 bp, Artificial Sequence
  source: /note="Description of Artificial Sequence: Synthetic polynucleotide"
atggctgccgatggttatcttccagattggctcgaggacactctctctgaaggaataagacagtggtggaagctcaaacctggcccaccaccgccaaagcccgcagagcggcataaggacgacagcaggggtcttgtgcttcctgggtataagtacctcggacccttcaacggactcgacaagggagagccggtcaacgaggcagacgccgcggccctcgagcacgacaaggcctacgaccggcagctcgacagcggagacaacccgtacctcaagtacaaccacgccgacgcggagtttcaggagcgccttaaagaagatacgtcttttgggggcaacctcggacgagcagtattccaggcgaaaaagagggttcttgaacctctgggcctggttgtggagcctgttaagacggctccgggaaaaaagaggccggtagagcactctcctgtggagccagactcctcctcgggaaccggaaaagcgggccagcagcctgcgagaaagagattgaattttgatcagactggagacgcagactccgtacctgacccccagcctctcggacagccaccagcagcccccacaagtttgggatctactacaatggctacaggcagtggcgcaccaatggcagacaataacgagggtgccgatggagtgggtaattcctcaggaaattggcattgcgattcccaatggtcgggcgacagagtcatcaccaccagcacccgaacctgggccctgcccacctacaacaaccacctctacaagcaaatctccagccgatcaggagccagcaacgacaaccactactttggctacagcaccccctgggggtattttgacttcaacggattccactgccacttttcaccacgtgactggcaaagactcatcaacaacaactggggattccgacccaagagactcaacttcaagctctttaacattcaagtcaaagaggtcacgcagaatgacggtacgacgacgattgccaataaccttaccagcacggttcaggtgtttactgactcggagtaccagctcccgcacgtcctcggctcggcgcatcaaggatgcctcccgccgtttccagcggacgtcttcatggtcccacagtatggatacctcaccctgaacaacgggagtcaggcggtaggacgctcttccttttactgcccggggtactttccttctcagatgcttcgtaccggaaacaactttaccttcagttacacctttgaagacgttcctttccacagcagctacgctcacagtcaaagtctggaccggctgatgaatcctcttatcgaccagtacctgtattatctaaacaaaacacaatcaaatagtggaactcttcagcagtctcggctactgtttagtcaagctggacctaccagcatgtctcttcaagctaaaaactggctgcctggaccttgctacagacaacagcgtctgtcaaagcaggcaaacggcaacaacaacagcaactttccctggactgcggctacaaagtatcatctaaatggccgggactcgttggttaatccaggaccagctatggccagccacaaagacgatgaagaaaagtttttccccatgcatggaaccctgatatttggcaaacaaggaacaaatgctaacgacgcggatttggacaatgtcatgattacagatgaagaagaaatccgtaccaccaatcccgtggctacggagcagtacgggactgtgtcaaataatttgcaaaactcaaatactggtccaactactggaactgtcaatcaccaaggagcgttacctggtatggtgtggcaggatcgagacgtgtaccttcagggacccatttgggccaagattcctcacaccgatggacactttcacccttctccgctgatgggaggttttggactcaaacacccgcctcctcagatcatgatcaaaaacactcccgttccagccaatcctcccacaaacttcagttctgccaagtttgcttctttcatcacacagtattccacgggacaggttagcgtggagatcgagtgggagctgcagaaggagaacagcaaacgctggaaccccgagatccagtacacttccaactacaacaagtctgttaatgtggactttactgtggacactaatggtgtgtattcagagcctcgccccattggcaccagatacctgactcgtaatctgtaa

SEQ ID NO: 3766 - DNA, 2208 bp, Artificial Sequence
  source: /note="Description of Artificial Sequence: Synthetic polynucleotide"
atggctgccgatggttatcttccagattggctcgaggacattctctctgaaggaataagacagtggtggaagctcaaacctggcccaccaccaccaaagcccgcagagcggcataaggacgacagcaggggtcttgtgcttcctgggtacaagtacctcggacccttcaacggactcgacaaaggagagccggtcaacgaggcagacgccgcggccctcgagcacgacaaggcctacgaccggcagctcgacagcggagacaacccgtacctcaagtacaaccacgccgacgcggagtttcaggggcgtcttaaagaagatacgtcttttgggggcaacctcggacgagcagtcttccaggcaaaaaagagggttcttgaacctctgggcctggttgaggaacctgttaagacggctccgggaaaaaagaggccggtagagcaatctcctgcggagccagactcctcctcgggaaccggaaaggcgggcaaccagcctgcaagaaagagattgaattttggtcagactggagacgcagactccgtacctgacccccagcctctcggacagccaccagcagccccctctggtctgggatctactacaatggctacaggcagtggcgcaccaatggcagacaataacgagggtgccgatggagtgggtaattcctcaggaaattggcattgcgattcccaatggttgggcgacagagtcatcaccaccagcacccgaacctgggccctgcccacctacaacaatcacctctacaagcaaatctccagccaatcaggagccagcaacgacaaccactactttggctacagcaccccctgggggtattttgacttcaacagattccactgccacttttcaccacgtgactggcaaagactcatcaacaacaactggggattccgacccaaaagactcaacttcaagctctttaacattcaagtcaaagaggtcacgcagaatgacggtacgacgacgattgccaataaccttaccagcacggttcaggtgtttactgactcggagtaccagctcccgtacgtcctcggctcggcgcatcaaggatgcctcccgccgtttccagcggacgtcttcatggtcccacagtatggatacctcaccctgaacaacgggagtcaggcggtaggacgctcttccttttactgcctggagtactttccttctcagatgcttcgtaccggaaacaactttaccttcagttacacctttgaagacgttcctttccacagcagctacgctcacagtcaaagtctggaccggctgatgaatcctctgatagaccagtacctgtattatctaaacaaaacacaatcaaatagtggaactcttcagcagtctcggctactgtttagtcaagctggacccaccagcatgtctcttcaagctaaaaactggctgcctggaccttgctacagacaacagcgtctgtcaaagcaggcaaacgacaacaacaacagcaactttccctggactgcggctacaaagtatcatctaaatggccgggactcgttggttaatccaggaccagctatggccagccacaaagacgatgaagaaaagtttttccccatgcatggaaccctgatatttggtaaacaaggaacaaatgctaacgacgcggatttggacaatgtcatgattacagatgaagaagaaatccgcaccaccaatcccgtggctacggagcagtacgggactgtgtcaaataatttgcaaaactcaaatactggtccaactactggaactgtcaatcaccaaggagcgttacctggtatggtgtggcaggatcgagacgtgtaccttcagggacccatttgggccaagattcctcacaccgatggacactttcatccttctccactgatgggaggttttggactcaaacacccgcctcctcagatcatgatcaaaaacactcccgttccagccaatcctcctacaaacttcagttctgccaagtttgcttctttcatcacacagtattccacggggcaggtcagcgtggagatagagtgggagctgcagaaggagaacagcaaacgctggaaccccgagatccagtatacttccaactacaacaagtctgttaatgtggactttactgtggacactaatggtgtgtattcagagcctcgccccattggcaccagatacctgactcgtaatctgtaa

SEQ ID NO: 3767 - DNA, 2208 bp, Artificial Sequence
  source: /note="Description of Artificial Sequence: Synthetic polynucleotide"
atggctgccgatggttatcttccagattggctcgaggacattctctctgaaggaataagacagtggtggaagctcaaacctggcccaccaccaccaaagcccgcagagcggcataaggacgacagcaggggtcttgtgcttcctgggtacaagtacctcggacccttcaacggactcgacaaaggagagccggtcaacgaggcagacgccgcggccctcgagcacgacaaggcctacgaccggcagctcgacagcggagacaacccgtacctcaagtacaaccacgccgacgcggagtttcaggagcgtcttaaagaagatacgtcttttgggggcaacctcggacgagcagtcttccaggcaaaaaagagggctcttgaacctctgggcctggttgaggaacctgttaagacggctccgggaaaaaagaggccggtagagcaatctcctgcggagccagactcctcctcgggaaccggaaaggcgggcaaccagcctgcaagaaagagatcgaattttggtcagactggagacgcagactccgtacctgacccccagcctctcggacagccaccagcagccccctctggtctgggatctactacaatggctacaggcagtggcgcaccaatggcagacaataacgagggtgccgatggagtgggtaattcctcaggaaattggcattgcgattcccaatggttgggcgacagagtcatcaccaccagcacccgaacctgggccctgcccacctacaacaatcacctctacaagcaaatctccagccaatcaggagccagcaacgacaaccactactttggctacagcaccccctgggggtattttgacttcaacagattccactgccacttttcaccacgtgactggcaaagactcatcaacaacaactggggattccgacccaaaagactcaacttcaagctctttaacattcaagtcaaagaggtcacgcagaatgacggtacgacgacgattgccaataaccttaccagcacggttcaggtgtttactgactcggagtaccagctcccgtacgtcctcggctcggcgcatcaaggatgcctcccgccgtttccagcggacgtcttcatggtcccacagtatggatacctcaccctgaacaacggaagtcaggcggtaggacgctcttccttttactgcctggagtactttccttctcagatgcttcgtaccggaaacaactttaccttcagttacacctttgaagacgttcctttccacagcagctacgctcacagtcaaagtctggaccggctgatgaatcctctgataggccagtacctgtattatctaaacaaaacacaatcaaatagtggaactcttcagcagtctcggctactgtttagtcaagctggacccaccagcatgtctcttcaagctaaaaactggctgcctggaccttgctacagacaacagcgtctgtcaaagcaggcaaacgacaacaacaacagcaactttccctggactgcggctacaaagtatcatctaaatggccgggactcgttggttaatccaggaccagctatggccagccacaaagacgatgaagaaaagtttttccccatgcatggaaccctgatatttggtaaacaaggaacaaatgctaacgacgcggatttggacaatgtcatgattacagatgaagaagaaatccgcaccaccaatcccgtggctacggagcagtacgggactgtgtcaaataatttgcaaaactcaaatactggtccaactactggaactgtcaatcaccaaggagcgttacctggtatggtgtggcaggatcgagacgtgtaccttcagggacccatttgggccaagattcctcacaccgatggacactttcatccttctccactgatgggaggttttggactcaaacacccgcctcctcagatcatgatcaaaaacactcccgttccagccaatcctcctacaaacttcagttctgccaagtttgcttctttcatcacacagtattccacggggcaggtcagcgtggagatagagtgggagctgcagaaggagaacagcaaacgctggaaccccgagatccagtatacttccaactacaacaagtctgttaatgtggactttactgtggacactaatggtgtgtattcagagcctcgccccattggcaccagatacctgactcgtaatctgtaa

SEQ ID NO: 3768 - DNA, 2217 bp, Artificial Sequence
  source: /note="Description of Artificial Sequence: Synthetic polynucleotide"
atggctgccgatggttatctcccagattggctcgaggacaacctctctgagggcattcgcgagtggtgggcactgaaacctggagccccgaagcccaaagccaaccagcaaaagcaggacgacggccggggtctggtgcttcctggctacaagtacctcggacccttcaacggactcgacaagggggagcccgtcaacgcggcggacgcggcggccctcgagcacgacaaggcctacgaccagcagctgcaggcgggtgacaatccgtacctgcggtataaccacgccgacgccgagtttcaggagcgtctgcaagaagatacgtcttttgggggcaacctcgggcgagcagtcttccaggccaagaagcgggttctcgaacctctcggtctggttgaggaaggcgctaagacggctcctggaaaggagagaccggtagagccatcaccccagcgttctccagactcctctacgggcatcggcaaggaaggccaacagcctgccagaaaaagactcaattttggtcagactggcgactcagagtcagttccagaccctcaacctctcggagaacctccagcagcgccctctggtgtgggacctaatacaatggctgcaggcggtggcgcaccaatggcagacaataacgaaggcgccgacggagtgggtagttcctcgggaaattggcattgcgattccacatggctgggcgacagagtcatcaccaccagcacccgaacctgggccctgcccacctacaacaaccacctctacaagcaaatctccaacgggacatcgggaggagccaccaacgacaacacctacttcggctacagcaccccctgggggtattttgactttaacagattccactgccacttttcaccacgtgactggcagcgactcatcaacaacaactggggattccggcccaagagactcagcttcaagctcttcaacatccaggtcaaggaggtcacgcagaatgaaggcaccaagaccaccgccaataacctcaccagcaccatccaggtgtttacggactcggagtaccagctgccgtacgttctcggctctgcccaccagggctgcctgcctccgttcccggcggacgtgttcacgattccccagtacggctacctaacactcaacaacggtagtcaggccgtgggacgctcctccttctactgcctggaatactttccttcgcagatgctgagaaccggcaacaacttccagtttacttacaccttcgaggacgtgcctttccacagcagctacgcccacagccagagcttggaccggctgatgaatcctctgattgaccagtacctgtactacttgtctcggattcaaacaacaggaggcacggcaaatacgcagactctgggcttcagccaaggtgggcctaatacaatggccaatcaggcaaagaactggctgccaggaccctgttaccgccaacaacgcgtctcaacgacaaccgggcaaaacaacaatagcaactttgcctggactgctgggaccaaataccatctgaatggaagaaattcattggctaatcctggcatcgctatggcaacacacaaagacgacgaggagcgtttttttcccagtaacgggatcctgatttttggcaaacaaaatgctgccagagacaatgcggattacagcgatgtcatgcccaccagcgaggaagaaatcaaaaccactaaccctgtggccacagaggaatacggtatcgtggcagataacttgcagcagcaaaacacggctcctcaaattggaactgtcaacagccagggggccttacccggtatggtctggcagaaccgggacgtgtacctgcagggtcccatctgggccaagattcctcacacggacggcaacttccacccgtctccgctgatgggcggctttggcctgaaacatcctccgcctcagatcctgatcaagaacacgcctgtacctgcggatcctccgaccaccttcaaccagtcaaagctgaactctttcatcacgcaatacagcaccggacaggtcagcgtggaaattgaatgggagctgcagaaggaaaacagcaagcgctggaaccccgagatccagtacacctccaactactacaaatctacaagtgtggactttgctgttaatacagaaggcgtgtactctgaaccccgccccattggcacccgttacctcactcgtaatctgtaa

SEQ ID NO: 3769 - DNA, 2217 bp, Artificial Sequence
  source: /note="Description of Artificial Sequence: Synthetic polynucleotide"
atggctgccgatggttatcttccagattggctcgaggacaacctctctgagggcattcgcgagtggtgggcgctgaaacctggagccccgaagcccaaagccaaccagcaaaagcaggacgacggccggggtctggtgcttcctggctacaagtacctcggacccttcaacggactcgacaagggggagcccgtcaacgcggcggacgcggcggccctcgagcacgacaaggcctacgaccagcagctgcaggcgggtgacaatccgtacctgcggtataaccacgccgacgccgagtttcaggagcgtctgcaagaagatacgtcttttgggggcaacctcgggcgagcagtcttccaggccaagaagcgggttctcgaacctctcggtctggttgaggaaggcgctaagacggctcctggaaagaagagaccggtagagccatcaccccagcgttctccagactcctctacgggcatcggcaaggggggccaacagcccgccagaaaaagactcaattttggtcagactggcgactcagagtcagttccagaccctcaacctctcggagaacctccagcagcgccctctggtgtgggacctaatacaatggctgcaggcggtggcgcaccaatggcagacaataacgaaggcgccgacggagtgggtagttcctcgggaaattggcattgcgattccacatggctgggcgacagagtcatcaccaccagcacccgaacctgggccctgcccacctacaacaaccacctctacaagcaaatctccaacgggacatcgggaggagccaccaacgacaacacctacttcggctacagcaccccctgggggtattttgactttaacagattccactgccacttttcaccacgtgactggcagcgactcatcaacaacaactggggattccggcccaagagactcagcttcaagctcttcaacatccaggtcaaggaggtcacgcagaatgaaggcaccaagaccatcgccaataacctcaccagcaccatccaggtgtttacggactcggagtaccagctgccgtacgttctcggctctgcccaccagggctgcctgcctccgttcccggcggacgtgttcacgattccccagtacggctacctaacactcaacaacggtagtcaggccgtgggacgctcctccttctactgcctggaatactttccttcgcagatgctgagaaccggcaacaacttccagtttacttacaccttcgaggacgtgcctttccacagcagctacgcccacagccagagcttggaccggctgatgaatcctctgattgaccagtacctgtactacttgtctcggattcaaacaacaggaggcacggcaaatacgcagactctgggcttcagccaaggtgggcctaatacaatggccaatcaggcaaagaactggctgccaggaccctgttaccgccaacaacgcgtctcaacgacaaccgggcaaaacaacaatagcaactttgcctggactgctgggaccaaataccatctgaatggaagaaattcattggctaatcctggcatcgctatggcaacacacaaagacgacgaggagcgtttttttcccagtaacgggatcctgatttttggcaaacaaaatgctgccagagacaatgcggattacagcgatgtcatgcccaccagcgaggaagaaatcaaaaccactaaccctgtggccacagaggaatacggtatcgtggcagataacttgcagcagcaaaacacggctcctcaaattggaactgtcaacagccagggggccttacccggtatggtctggcagaaccgggacgtgtacctgcagggtcccatctgggccaagattcctcacacggacggcaacttccacccgtctccgctgatgggcggctttggcctgaaacatcctccgcctcagatcctgatcaagaacacgcctgtacctgcggatcctccgaccaccttcaaccagtcaaagctgaactctttcatcacgcaatacagtaccggacaggtcagcgtggaaattgaatgggagctgcagaaggaaaacagcaagcgctggaaccccgagatccagtacacctccaactactacaaatctacaagtgtggactttgctgttaatacagaaggcgtgtactctgaaccccgccccattggcacccgttacctcacccgtaatctgtaa

SEQ ID NO: 3770 - DNA, 2217 bp, Artificial Sequence
  source: /note="Description of Artificial Sequence: Synthetic polynucleotide"
atggctgccgatggttatctcccagattggctcgaggacaacctctctgagggcattcgcgagtggtgggcactgaaacctggagccccgaagcccaaagccaaccagcaaaagcaggacgacggccggggtctggtgcttcctggctacaagtacctcggacccttcaacggactcgacaagggggagcccgtcaacgcggcggacgcggcggccctcgagcacgacaaggcctacgaccagcagctgcaggcgggtgacaatccgtacctgcggtataaccacgccgacgccgagtttcaggagcgtctgcaagaagatacgtcttttgggggcaacctcgggcgagcagtcttccaggccaagaagcgggttctcgaacctctcggtctggttgaggaaggcgctaagacggctcctggaaaggagagaccggtagagccatcaccccagcgttctccagactcctctacgggcatcggcaagaagggccaacagcctgccagaaaaagactcaattttggtcagactggcgactcagagtcagttccagaccctcaacctctcggagaacctccagcagcgccctctggtgtgggacctaatacaatggctgcaggcggtggcgcaccaatggcagacaataacgaaggcgccgacggagtgggtagttcctcgggaaattggcattgcgattccacatggctgggcgacagagtcatcaccaccagcacccgaacctgggccctgcccacctacaacaaccacctctacaagcaaatctccaacgggacatcgggaggagccaccaacgacaacacctacttcggctacagcaccccctgggggtattttgactttaacagattccactgccacttttcaccacgtgactggcagcgactcatcaacaacaactggggattccggcccaagagactcagcttcaagctcttcaacatccaggtcaaggaggtcacgcagaatgaaggcaccaagaccaccgccaataacctcaccagcaccatccaggtgtttacggactcggagtaccagctgccgtacgttctcggctctgcccaccagggctgcctgcctccgttcccggcggacgtgttcacgattccccagtacggctacctaacactcaacaacggtagtcaggccgtgggacgctcctccttctactgcctggaatactttccttcgcagatgctgagaaccggcaacaacttccagtttacttacaccttcgaggacgcgcctttccacagcagctacgcccacagccagagcttggaccggctgatgaatcctctgattgaccagtacctgtactacttgtctcggattcaaacaacaggaggcacggcaaatacgcagactctgggcttcagccaaggtgggcctaatacaatggccaatcaggcaaagaactggctgccaggaccctgttaccgccaacaacgcgtctcaacgacaaccgggcaaaacaacaatagcaactttgcctggactgctgggaccaaataccatctgaatggaagaaattcattggctaatcctggcatcgctatggcaacacacaaagacgacgaggagcgtttttttcccagtaacgggatcctgatttttggcaaacaaaatgctgccagagacaatgcggattacagcgatgtcatgcccaccagcgaggaagaaatcaaaaccactaaccctgtggccacagaggaatacggtatcgtggcagataacttgcagcagcaaaacacggctcctcaaattggaactgtcaacagccagggggccttacccggtatggtctggcagaaccgggacgtgtacctgcagggtcccatctgggccaagattcctcacacggacggcaacttccacccgtctccgctgatgggcggctttggcctgaaacatcctccgcctcagatcctgatcaagaacacgcctgtacctgcggatcctccgaccaccttcaaccagtcaaagctgaactctttcatcacgcaatacagcaccggacaggtcagcgtggaaattgaatgggagctgcagaaggaaaacagcaagcgctggaaccccgagatccagtacacctccaactactacaaatctacaagtgtggactttgctgttaatacagaaggcgtgtactctgaaccccgccccattggcacccgttacctcactcgtaatctgtaa

SEQ ID NO: 3771 - DNA, 2217 bp, Artificial Sequence
  source: /note="Description of Artificial Sequence: Synthetic polynucleotide"
atggctgccgatggttatcttccagattggctcgaggacaacctctctgagggcattcgcgagtggtgggcgctgaaacctggagccccgaagcccaaagccaaccagcaaaagcaggacgacggccggggtctggtgcttcctggctacaagtacctcggacccttcaacggactcgacaagggggagcccgtcaacgcggcggacgcggcggccctcgagcacgacaaggcctacgaccagcagctgcaggcgggtgacaatccgtacctgcggtataaccacgccgacgccgagtttcaggagcgtctgcaagaagatacgtcttttgggggcaacctcgggcgagcagtcttccaggccaagaagcgggttctcgaacctctcggtctggttgaggaaggcgctaagacggctcctggaaagaagagaccggtagagccatcaccccagcgttctccagactcctctacgggcatcggcaaggagggccaacagcccgccagaaaaagactcaattttggtcagactggcgactcagagtcagttccagaccctcaacctctcggagaacctccagcagcgccctctggtgtgggacctaatacaatggctgcaggcggtggcgcaccaatggcagacaataacgaaggcgccgacggagtgggtagttcctcgggaaattggcattgcgattccacatggctgggcgacagagtcatcaccaccagcacccgaacctgggccctgcccacctacaacaaccacctctacaagcaaatctccaacgggacatcgggaggagccaccaacgacaacacctacttcggctacagcaccccctgggggtattttgactttaacagattccactgccacttttcaccacgtgactggcagcgactcatcaacaacaactggggattccggcccaagagactcagcttcaagctcttcaacatccaggtcaaggaggtcacgcagaatgaaggcaccaagaccatcgccaataacctcaccagcaccatccaggtgtttacggactcggagtaccagctgccgtacgttctcggctctgcccaccagggctgcctgcctccgttcccggcggacgtgttcacgattccccagtacggctacctaacactcaacaacggtagtcaggccgtgggacgctcctccttctactgcctggaatactttccttcgcagatgctgagaaccggcaacaacttccagtttacttacaccttcgaggacgtgcctttccacagcagctacgcccacagccagagcttggaccggctgatgaatcctctgattgaccagtacctgtactacttgtctcggattcaaacaacaggaggcacggcaaatacgcagactctgggcttcagccaaggtgggcctaatacaatggccaatcaggcaaagaactggctgccaggaccctgttaccgccaacaacgcgtctcaacgacaaccgggcaaaacaacaatagcaactttgcctggactgctgggaccaaataccatctgaatggaagaaattcattggctaatcctggcatcgctatggcaacacacaaagacgacgaggagcgtttttttcccagtaacgggatcctgatttttggcaaacaaaatgctgccagagacaatgcggattacagcgatgtcatgcccaccagcgaggaagaaatcaaaaccactaaccctgtggccacagaggaatacggtatcgtggcagataacttgcagcagcaaaacacggctcctcaaattggaactgtcaacagccagggggccttacccggtatggtctggcagaaccgggacgtgtacctgcagggtcccatctgggccaagattcctcacacggacggcaacttccacccgtctccgctgatgggcggctttggcctgaaacatcctccgcctcagatcctgatcaagaacacgcctgtacctgcggatcctccgaccaccttcaaccagtcaaagctgaactctttcatcacgcaatactgtaccggacaggtcagcgtggaaattgaatgggagctgcagaaggaaaacagcaagcgctggaaccccgagatccagtacacctccaactactacaaatctacaagtgtggactttgctgttaatacagaaggcgtgtactctgaaccccgccccattggcacccgttacctcactcgtaatctgtaa

SEQ ID NO: 3772 - DNA, 2217 bp, Artificial Sequence
  source: /note="Description of Artificial Sequence: Synthetic polynucleotide"
atggctgccgatggttatcttccagattggctcgaggacaacctctctgagggcattcgcgagtggtgggcgctgaaacctggagccccgaagcccaaagccaaccagcaaaagcaggacgacggccggggtctggtgcttcctggctacaagtacctcggacccttcaacggactcgacaagggggagcccgtcaacgcggcggacgcggcggccctcgagcacgacaaggcctacgaccagcagctgcaggcgggtgacaatccgtacctgcggtataaccacgccgacgccgagtttcaggagcgtctgcaagaagatacgtcttttgggggcaacctcgggcgagcagtcttccaggccaagaagcgggttctcgaacctctcggtctggttgaggaaggcgctaagacggctcctggaaagaagagaccggtagagccatcaccccagcgttctccagactcctctacgggcatcggcaaggagggccaacagcccgccagaaaaagactcaattttggtcagactggcgactcagagtcagttccagaccctcaacctctcggagaacctccagcagcgccctctggtgtgggacctaatacaatggctgcaggcggtggcgcaccaatggcagacaataacgaaggcgccgacggagtgggtagttcctcgggaaattggcattgcgattccacatggctgggcgacagagtcatcaccaccagcacccgaacctgggccctgcccacctacaacaaccacctctacaagcaaatctccaacgggacatcgggaggagccaccaacgacaacacctacttcggctacagcaccccctgggggtattttgactttaacagattccactgccacttttcaccacgtgactggcagcgactcatcaacaacaactggggattccggcccaagagactcagcttcaagctcttcaacatccaggtcaaggaggtcacgcagaatgaaggcaccaagaccatcgccaataacctcaccagcaccatccaggtgtttacggactcggagtaccagctgccgtacgttctcggctctgcccaccagggctgcctgcctccgttcccggcggacgtgttcacgattccccagtacggctacctaacactcaacaacggtagtcaggccgtgggacgctcctccttctactgcctggaatactttccttcgcagatgctgagaaccggcaacaacttccagtttacttacaccttcgaggacgtgcctttccacagcagctacgcccacagccagagcttggaccggctgatgaatcctctgattgaccagtacctgtactacttgtctcggattcaaacaacaggaggcacggcaaatacgcagactctgggcttcagccaaggtgggcctaatacaatggccaatcaggcaaagaactggctgccaggaccctgttaccgccaacaacgcgtctcaacgacaaccgggcaaaacaacaatagcaactttgcctggactgctgggaccaaataccatctgaatggaagaaattcattggctaatcctggcatcgctatggcaacacacaaagacgacgaggagcgtttttttcccagtaacgggatcctgatttttggcaaacaaaatgctgccagagacaatgcggattacagcgatgtcatgcccaccagcgaggaagaaatcaaaaccactaaccctgtggccacagaggaatacggtatcgtggcagataacttgcagcagcaaaacacggctcctcaaattggaactgtcaacagccagggggccttacccggtatggtctggcagaaccgggacgtgtacctgcagggtcccatctgggccaagattcctcacacggacggcaacttccacccgtctccgctgatgggcggctttggcctgaaacatcctccgcctcagatcctgatcaagaacacgcctgtacctgcggatcctccgaccaccttcaaccagtcaaagctgaactctttcatcacgcaatacagcaccggacaggtcagcgtggaaattgaatgggagctgcagaaggaaaacagcaagcgctggaaccccgagatccagtacacctccaactactacaaatctacaagtgtggactttgctgttaatacagaaggcgtgtactctgaaccccgccccattggcacccgttacctcacccgtaatctgtaa

SEQ ID NO: 3773 - DNA, 2217 bp, Artificial Sequence
  source: /note="Description of Artificial Sequence: Synthetic polynucleotide"
atggctgccgatggttatctcccagattggctcgaggacaacctctctgagggcattcgcgagtggtgggcactgaaacctggagccccgaagcccaaagccaaccagcaaaagcaggacgacggccggggtctggtgcttcctggctacaagtacctcggacccttcaacggactcgacaagggggagcccgtcaacgcggcggacgcggcggccctcgagcacgacaaggcctacgaccagcagctgcaggcgggtgacaatccgtacctgcggtataaccacgccgacgccgagtttcaggagcgtctgcaagaagatacgtcttttgggggcaacctcgggcgagcagtcttccaggccaagaagcgggttctcgaacctctcggtctggttgaggaaggcgctaagacggctcctggaaaggagagaccggtagagccatcaccccagcgttctccagactcctctacgggcatcggcaagaagggccaacagcctgccagaaaaagactcaattttggtcagactggcgactcagagtcagttccagaccctcaacctctcggagaacctccagcagcgccctctggtgtgggacctaatacaatggctgcaggcggtggcgcaccaatggcagacaataacgaaggcgccgacggagtgggtagttcctcgggaaattggcattgcgattccacatggctgggcgacagagtcatcaccaccagcacccgaacctgggccctgcccacctacaacaaccacctctacaagcaaatccccaacgggacatcgggaggagccaccaacgacaacacctacttcggctacagcaccccctgggggtattttgactttaacagattccactgccacttttcaccacgtgactggcagcgactcatcaacaacaactggggattccggcccaagagactcagcttcaagctcttcaacatccaggtcaaggaggtcacgcagaatgaaggcaccaagaccaccgccaataacctcaccagcaccatccaggtgtttacggactcggagtaccagctgccgtacgttctcggctctgcccaccagggctgcctgcctccgttcccggcggacgtgttcacgattccccagtacggctacctaacactcaacaacggtagtcaggccgtgggacgctcctccttctactgcctggaatactttccttcgcagatgctgagaaccggcaacaacttccagtttacttacaccttcgaggacgtgcctttccacagcagctacgcccacagccagagcttggaccggctgatgaatcctctgattgaccagtacctgtactacttgtctcggattcaaacaacaggaggcacggcaaatacgcagactctgggcttcagccaaggtgggcctaatacaatggccaatcaggcaaagaactggctgccaggaccctgttaccgccaacaacgcgtctcaacgacaaccgggcaaaacaacaatagcaactttgcctggactgctgggaccaaataccatctgaatggaagaaattcattggctaatcctggcatcgctatggcaacacacaaagacgacgaggagcgtttttttcccagtaacgggatcctgatttttggcaaacaaaatgctgccagagacaatgcggattacagcgatgtcatgcccaccagcgaggaagaaatcaaaaccactaaccctgtggccacagaggaatacggtatcgtggcagataacttgcagcagcaaaacacggctcctcaaattggaactgtcaacagccagggggccttacccggtatggtctggcagaaccgggacgtgtacctgcagggtcccatctgggccaagattcctcacacggacggcaacttccacccgtctccgctgatgggcggctttggcctgaaacatcctccgcctcagatcctgatcaagaacacgcctgtacctgcggatcctccgaccaccttcaaccagtcaaagctgaactctttcatcacgcaatacagcaccggacaggtcagcgtggaaattgaatgggagctgcagaaggaaaacagcaagcgctggaaccccgagatccagtacacctccaactactacaaatctacaagtgtggactttgctgttaatacagaaggcgtgtactctgaaccccgccccattggcacccgttacctcacccgtaatctgtaa

SEQ ID NO: 3774 - DNA, 2217 bp, Artificial Sequence
  source: /note="Description of Artificial Sequence: Synthetic polynucleotide"
atggctgccgatggttatcttccagattggctcgaggacaacctctctgagggcattcgcgagtggtgggcgctgaaacctggagccccgaagcccaaagccaaccagcaaaagcaggacgacggccggggtctggtgcttcctggctacaagtacctcggacccttcaacggactcgacaagggggagcccgtcaacgcggcggacgcggcggccctcgagcacgacaaggcctacgaccagcagctgcaggcgggtgacaatccgtacctgcggtataaccacgccgacgccgagtttcaggagcgtctgcaagaagatacgtcttttgggggcaacctcgggcgagcagtcttccaggccaagaagcgggttctcgaacctctcggtctggttgaggaaggcgctaagacggctcctggaaagaagagaccggtagagccatcaccccagcgttctccagactcctctacgggcatcggcaaggagggccaacagcccgccagaaaaagactcaattttggtcagactggcgactcagagtcagttccagaccctcaacctctcggagaacctccagcagcgccctctggtgtgggacctaatacaatggctgcaggcggtggcgcaccaatggcagacaataacgaaggcgccgacggagtgggtagttcctcgggaaattggcattgcgattccacatggctgggcgacagagtcatcaccaccagcacccgaacctgggccctgcccacctacaacaaccacctctacaagcaaatctccaacgggacatcgggaggagccaccaacgacaacacctacttcggctacagcaccccctgggggtattttgactttaacagattccactgccacttttcaccacgtgactggcagcgactcatcaacaacaactggggattccggcccaagagactcagcttcaagctcttcaacatccaggtcaaggaggtcacgcagaatgaaggcaccaagaccaccgccaataacctcaccagcaccatccaggtgtttacggactcggagtaccagctgccgtacgttctcggctctgcccaccagggctgcctgcctccgttcccggcggacgtgttcacgattccccagtacggctacctaacactcaacaacggtagtcaggccgtgggacgctcctccttctactgcctggaatactttccttcgcagatgctgagaaccggcaacaacttccagtttacttacaccttcgaggacgtgcctttccacagcagctacgcccacagccagagcttggaccggctgatgaatcctctgattgaccagtacctgtactacttgtctcggattcaaacaacaggaggcacggcaaatacgcagactctgggcttcagccaaggtgggcctaatacaatggccaatcaggcaaagaactggctgccaggaccctgttaccgccaacaacgcgtctcaacgacaaccgggcaaaacaacaatagcaactttgcctggactgctgggaccaaataccatctgaatggaagaaattcattggctaatcctggcatcgctatggcaacacacaaagacgacgaggagcgtttttttcccagtaacgggatcctgatttttggcaaacaaaatgctgccagagacaatgcggattacagcgatgtcatgcccaccagcgaggaagaaatcaaaaccactaaccctgtggccacagaggaatacggtatcgtggcagataacttgcagcagcaaaacacggctcctcaaattggaactgtcaacagccagggggccttacccggtatggtctggcagaaccgggacgtgtacctgcagggtcccatctgggccaagattcctcacacggacggcaacttccacccgtctccgctgatgggcggctttggcctgaaacatcctccgcctcagatcctgatcaagaacacgcctgtacctgcggatcctccgaccaccttcaaccagtcaaagctgaactctttcatcacgcaatacagcaccggacaggtcagcgtggaaattgaatgggagctgcagaaggaaaacagcaagcgctggaaccccgagatccagtacacctccaactactacaaatctacaagtgtggactttgctgttaatacagaaggcgtgtactctgaaccccgccccattggcacccgttacctcacccgtaatctgtaa

SEQ ID NO: 3775 - DNA, 2217 bp, Artificial Sequence
  source: /note="Description of Artificial Sequence: Synthetic polynucleotide"
atggctgccgatggttatctcccagattggctcgaggacaacctctctgagggcattcgcgagtggtgggcactgaaacctggagccccgaagcccaaagccaaccagcaaaagcaggacgacggccggggtctggtgcttcctggctacaagtacctcggacccttcaacggactcgacaagggggagcccgtcaacgcggcggacgcggcggccctcgagcacgacaaggcctacgaccagcagctgcaggcgggtgacaatccgtacctgcggtataaccacgccgacgccgagtttcaggagcgtctgcaagaagatacgtcttttgggggcaacctcgggcgagcagtcttccaggccaagaagcgggttctcgaacctctcggtctggttgaggaaggcgctaagacggctcctggaaaggagagaccggtagagccatcaccccagcgttctccagactcctctacgggcatcggcaagaagggccaacagcctgccagaaaaagactcaattttggtcagactggcgactcagagtcagttccagaccctcaacctctcggagaacctccagcagcgccctctggtgtgggacctaatacaatggctgcaggcggtggcgcaccaatggcagacaataacgaaggcgccgacggagtgggtagttcctcgggaaattggcattgcgattccacatggctgggcgacagagtcatcaccaccagcacccgaacctgggccctgcccacctacaacaaccacctctacaagcaaatctccaacgggacatcgggaggagccaccaacgacaacacctacttcggctacagcaccccctgggggtattttgactttaacagattccactgccacttttcaccacgtgactggcagcgactcatcaacaacaactggggattccggcccaagagactcagcttcaagctcttcaacatccaggtcaaggaggtcacgcagaatgaaggcaccaagaccaccgccaataacctcaccagcaccatccaggtgtttacggactcggagtaccagctgccgtacgttctcggctctgcccaccagggctgcctgcctccgttcccggcggacgtgttcacgattccccagtacggctacctaacactcaacaacggtagtcaggccgtgggacgctcctccttctactgcctggaatactttccttcgcagatgctgagaaccggcaacaacttccagtttacttacaccttcgaggacgtgcctttccacagcagctacgcccacagccagagcttggaccggctgatgaatcctctgattgaccagtacctgtactacttgtctcggattcaaacaacaggaggcacggcaaatacgcagactctgggcttcagccaaggtgggcctaatacaatggccaatcaggcaaagaactggctgccaggaccctgttaccgccaacaacgcgtctcaacgacaaccgggcaaaacaacaatagcaactttgcctggactgctgggaccaaataccatctgaatggaagaaattcattggctaatcctggcatcgctatggcaacacacaaagacgacgaggagcgtttttttcccagtaacgggatcctgatttttggcaaacaaaatgctgccagagacaatgcggattacagcgatgtcatgcccaccagcgaggaagaaatcaaaaccactaaccctgtggccacagaggaatacggtatcgtggcagataacttgcagcagcaaaacacggctcctcaaattggaactgtcaacagccagggggccttacccggtatggtctggcagaaccgggacgtgtacctgcagggtcccatctgggccaagattcctcacacggacggcaacttccacccgtctccgctgatgggcggctttggcctgaaacatcctccgcctcagatcctgatcaagaacacgcctgtacctgcggatcctccgaccaccttcaaccagtcaaagctgaactctttcatcacgcaatacagtaccggacaggtcagcgtggaaattgaatgggagctgcagaaggaaaacagcaagcgctggaaccccgagatccagtacacctccaactactacaaatctacaagtgtggactttgctgttaatacagaaggcgtgtactctgaaccccgccccattggcacccgttacctcacccgtaatctgtaa

SEQ ID NO: 3776 - DNA, 2217 bp, Artificial Sequence
  source: /note="Description of Artificial Sequence: Synthetic polynucleotide"
atggctgccgatggttatctcccagattggctcgaggacaacctctctgagggcattcgcgagtggtgggcactgaaacctggagccccgaagcccaaagccaaccagcaaaagcaggacgacggccggggtctggtgcttcctggctacaagtacctcggacccttcaacggactcgacaagggggagcccgtcaacgcggcggacgcggcggccctcgagcacgacaaggcctacgaccagcagctgcaggcgggtgacaatccgtacctgcggtataaccacgccgacgccgagtttcaggagcgtctgcaagaagatacgtcttttgggggcaacctcgggcgagcagtcttccaggccaagaagcgggttctcgaacctctcggtctggttgaggaaggcgctaagacggctcctggaaaggagagaccggtagagccatcaccccagcgttctccagactcctctacgggcatcggcaagaagggccaacagcctgccagaaaaagactcaattttggtcagactggcgactcagagtcagttccagaccctcaacctctcggagaacctccagcagcgccctctggtgtgggacctaatacaatggctgcaggcggtggcgcaccaatggcagacaataacgaaggcgccgacggagtgggtagttcctcgggaaattggcattgcgattccacatggctgggcgacagagtcatcaccaccagcacccgaacctgggccctgcccacctacaacaaccacctctacaagcaaatctccaacgggacatcgggaggagccaccaacgacaacacctacttcggctacagcaccccctgggggtattttgactttaacagattccactgccacttttcaccacgtgactggcagcgactcatcaacaacaactggggattccggcccaagagactcagcttcaagctcttcaacatccaggtcaaggaggtcacgcagaatgaaggcaccaagaccatcgccaataacctcaccagcaccatccaggtgtttacggactcggagtaccagctgccgtacgttctcggctctgcccaccagggctgcctgcctccgttcccggcggacgtgttcacgattccccagtacggctacctaacactcaacaacggtagtcaggccgtgggacgctcctccttctactgcctggaatactttccttcgcagatgctgagaaccggcaacaacttccagtttacttacaccttcgaggacgtgcctttccacagcagctacgcccacagccagagcttggaccggctgatgaatcctctgattgaccagtacctgtactacttgtctcggattcaaacaacaggaggcacggcaaatacgcagactctgggcttcagccaaggtgggcctaatacaatggccaatcaggcaaagaactggctgccaggaccctgttaccgccaacaacgcgtctcaacgacaaccgggcaaaacaacaatagcaactttgcctggactgctgggaccaaataccatctgaatggaagaaattcattggctaatcctggcatcgctatggcaacacacaaagacgacgaggagcgtttttttcccagtaacgggatcctgatttttggcaaacaaaatgctgccagagacaatgcggattacagcgatgtcatgcccaccagcgaggaagaaatcaaaaccactaaccctgtggccacagaggaatacggtatcgtggcagataacttgcagcagcaaaacacggctcctcaaattggaactgtcaacagccagggggccttacccggtatggtctggcagaaccgggacgtgtacctgcagggtcccatctgggccaagattcctcacacggacggcaacttccacccgtctccgctgatgggcggctttggcctgaaacatcctccgcctcagatcctgatcaagaacacgcctgtacctgcggatcctccgaccaccttcaaccagtcaaagctgaactctttcatcacgcaatacagtaccggacaggtcagcgtggaaattgaatgggagctgcagaaggaaaacagcaagcgctggaaccccgagatccagtacacctccaactactacaaatctacaagtgtggactttgctgttaatacagaaggcgtgtactctgaaccccgccccattggcacccgttacctcacccgtaatctgtaa

SEQ ID NO: 3777 - DNA, 2217 bp, Artificial Sequence
  source: /note="Description of Artificial Sequence: Synthetic polynucleotide"
atggctgccgatggttatcttccagattggctcgaggacaacctctctgagggcattcgcgagtggtgggcgctgaaacctggagccccgaagcccaaagccaaccagcaaaagcaggacgacggccggggtctggtgcttcctggctacaagtacctcggacccttcaacggactcgacaagggggagcccgtcaacgcggcggacgcggcggccctcgagcacgacaaggcctacgaccagcagctgcaggcgggtgacaatccgtacctgcggtataaccacgccgacgccgagtttcaggagcgtctgcaagaagatacgtcttttgggggcaacctcgggcgagcagtcttccaggccaagaagcgggttctcgaacctctcggtctggttgaggaaggcgctaagacggctcctggaaagaagagaccggtagagccatcaccccagcgttctccagactcctctacgggcatcggcaagaagggccaacagcccgccagaaaaagactcaattttggtcagactggcgactcagagtcagttccagaccctcaacctctcggagaacctccagcagcgccctctggtgtgggacctaatacaatggctgcaggcggtggcgcaccaatggcagacaataacgaaggcgccgacggagtgggtagttcctcgggaaattggcattgcgattccacatggctgggcgacagagtcatcaccaccagcacccgaacctgggccctgcccacctacaacaaccacctctacaagcaaatctccaacgggacatcgggaggagccaccaacgacaacacctacttcggctacagcaccccctgggggtattttgactttaacagattccactgccacttttcaccacgtgactggcagcgactcatcaacaacaactggggattccggcccaagagactcagcttcaagctcttcaacatccaggtcaaggaggtcacgcagaatgaaggcaccaagaccatcgccaataacctcaccagcaccatccaggtgtttacggactcggagtacccgctgccgtacgttctcggctctgcccaccagggctgcctgcctccgttcccggcggacgtgttcacgattccccagtacggctacctaacactcaacaacggtagtcaggccgtgggacgctcctccttctactgcctggaatactttccttcgcagatgctgagaaccggcaacaacttccagtttacttacaccttcgaggacgtgcctttccacagcagctacgcccacagccagagcttggaccggctgatgaatcctctgattgaccagtacctgtactacttgtctcggattcaaacaacaggaggcacggcaaatacgcagactctgggcttcagccaaggtgggcctaatacaatggccaatcaggcaaagaactggctgccaggaccctgttaccgccaacaacgcgtctcaacgacaaccgggcaaaacaacaatagcaactttgcctggactgctgggaccaaataccatctgaatggaagaaattcattggctaatcctggcatcgctatggcaacacacaaagacgacgaggagcgtttttttcccagtaacgggatcctgatttttggcaaacaaaatgctgccagagacaatgcggattacagcgatgtcatgcccaccagcgaggaagaaatcaaaaccactaaccctgtggccacagaggaatacggtatcgtggcagataacttgcagcagcaaaacacggctcctcaaattggaactgtcaacagccagggggccttacccggtatggtctggcagaaccgggacgtgtacctgcagggtcccatctgggccaagattcctcacacggacggcaacttccacccgtctccgctgatgggcggctttggcctgaaacatcctccgcctcagatcctgatcaagaacacgcctgtacctgcggaccctccgaccaccttcaaccagtcaaagctgaactctttcatcacgcaatacagcaccggacaggtcagcgtggaaattgaatgggagctgcagaaggaaaacagcaagcgctggaaccccgagatccagtacacctccaactactacaaatctacaagtgtggactttgctgttaatacagaaggcgtgtactctgaaccccgccccattggcacccgttacctcacccgtaatctgtaa

SEQ ID NO: 3778 - DNA, 2217 bp, Artificial Sequence
  source: /note="Description of Artificial Sequence: Synthetic polynucleotide"
atggctgccgatggttatcttccagattggctcgaggacaacctctctgagggcattcgcgagtggtgggcgctgaaacctggagccccgaagcccaaagccaaccagcaaaagcaggacgacggccggggtctggtgcttcctggctacaagtacctcggacccttcaacggactcgacaagggggagcccgtcaacgcggcggacgcggcggccctcgagcacgacaaggcctacgaccagcagctgcaggcgggtgacaatccgtacctgcggtataaccacgccgacgccgagtttcaggagcgtctgcaagaagatacgtcttttgggggcaacctcgggcgagcagtcttccaggccaagaagcgggttctcgaacctctcggtctggttgaggaaggcgctaagacggctcctggaaagaagagaccggtagagccatcaccccagcgttctccagactcctctacgggcatcggcaagaagggccaacagcccgccagaaaaagactcaattttggtcagactggcgactcagagtcagttccagaccctcaacctctcggagaacctccagcagcgccctctggtgtgggacctaatacaatggctgcaggcggtggcgcaccaatggcagacaataacgaaggcgccgacggagtgggtagttcctcgggaaattggcattgcgattccacatggctgggcgacagagtcatcaccaccagcacccgaacctgggccctgcccacctacaacaaccacctctacaagcaaatctccaacgggacatcgggaggagccaccaacgacaacacctacttcggctacagcaccccctgggggtattttgactttaacagattccactgccacttttcaccacgtgactggcagcgactcatcaacaacaactggggattccggcccaagagactcagcttcaagctcttcaacatccaggtcaaggaggtcacgcagaatgaaggcaccaagaccatcgccaataacctcaccagcaccatccaggtgtttacggactcggagtaccagctgccgtacgttctcggctctgcccaccagggctgcctgcctccgttcccggcggacgtgttcacgattccccagtacggctacctaacactcaacaacggtagtcaggccgtgggacgctcctccttctactgcctggaatactttccttcgcagatgctgagaaccggcaacaacttccagtttacttacaccttcgaggacgtgcctttccacagcagctacgcccacagccagagcttggaccggctgatgaatcctctgattgaccagtacctgtactacttgtctcggattcaaacaacaggaggcacggcaaatacgcagactctgggcttcagccaaggtgggcctaatacaatggccaatcaggcaaagaactggctgccaggaccctgttaccgccaacaacgcgtctcaacgacaaccgggcaaaacaacaatagcaactttgcctggactgctgggaccaaataccatctgaatggaagaaattcattggctaatcctggcatcgctatggcaacacacaaagacgacgaggagcgtttttttcccagtaacgggatcctgatttttggcaaacaaaatgctgccagagacaatgcggattacagcgatgtcatgcccaccagcgaggaagaaatcaaaaccactaaccctgtggccacagaggaatacggtatcgtggcagataacttgcagcagcaaaacacggctcctcaaattggaactgtcaacagccagggggccttacccggtatggtctggcagaaccgggacgtgtacctgcagggtcccatctgggccaagattcctcacacggacggcaacttccacccgtctccgctgatgggcggctttggcctgaaacatcctccgcctcagatcctgatcaagaacacgcctgtacctgcggatcctccgaccaccttcaaccagtcaaagctgaactctttcatcacgcaatacggcaccggacaggtcagcgtggaaattgaatgggagctgcagaaggaaaacagcaagcgctggaaccccgagatccagtacacctccaactactacaaatctacaagtgtggactttgctgttaatacagaaggcgtgtactctgaaccccgccccattggcacccgttacctcacccgtaatctgtaa

SEQ ID NO: 3779 - DNA, 2217 bp, Artificial Sequence
  source: /note="Description of Artificial Sequence: Synthetic polynucleotide"
atggctgccgatggttatcttccagattggctcgaggacaacctctctgagggcattcgcgagtggtgggcgctgaaacctggagccccgaagcccaaagccaaccagcaaaagcaggacgacggccggggtctggtgcttcctggctacaagtacctcggacccttcaacggactcgacaagggggagcccgtcaacgcggcggacgcggcggccctcgagcacgacaaggcctacgaccagcagctgcaggcgggtgacaatccgtacctgcggtataaccacgccgacgccgagtttcaggagcgtctgcaagaagatacgtcttttgggggcaacctcgggcgagcagtcttccaggccaagaagcgggttctcgaacctctcggtctggttgaggaaggcgctaagacggctcctggaaagaagagaccggtagagccatcaccccagcgttctccagactcctctacgggcatcggcaagaagggccaacagcccgccagaaaaagactcaattttggtcagactggcgactcagagtcagttccagaccctcaacctctcggagaacctccagcagcgccctctggtgtgggacctaatacaatggctgcaggcggtggcgcaccaatggcagacaataacgaaggcgccgacggagtgggtagttcctcgggaaattggcattgcgattccacatggctgggcgacagagtcatcaccaccagcacccgaacctgggccctgcccacctacaacaaccacctctacaagcaaatctccaacgggacatcgggaggagccaccaacgacaacacctacttcggctacagcaccccctgggggtattttgactttaacagattccactgccacttttcaccacgtgactggcagcgactcatcaacaacaactggggattccggcccaagagactcagcttcaagcccttcaacatccaggtcaaggaggtcacgcagaatgaaggcaccaagaccatcgccaataacctcaccagcaccatccaggtgtttacggactcggagtaccagctgccgtacgttctcggctctgcccaccagggctgcctgcctccgttcccggcggacgtgttcacgattccccagtacggctacctaacactcaacaacggtagtcaggccgtgggacgctcctccttctactgcctggaatactttccttcgcagatgctgagaaccggcaacaacttccagtttacttacaccttcgaggacgtgcctttccacagcagctacgcccacagccagagcttggaccggctgatgaatcctctgattgaccagtacctgtactacttgtctcggattcaaacaacaggaggcacggcaaatacgcagactctgggcttcagccaaggtgggcctaatacaatggccaatcaggcaaagaactggctgccaggaccctgttaccgccaacaacgcgtctcaacgacaaccgggcaaaacaacaatagcaactttgcctggactgctgggaccaaataccatctgaatggaagaaattcattggctaatcctggcatcgctatggcaacacacaaagacgacgaggagcgtttttttcccagtaacgggatcctgatttttggcaaacaaaatgctgccagagacaatgcggattacagcgatgtcatgcccaccagcgaggaagaaatcaaaaccactaaccctgtggccacagaggaatacggtatcgtggcagataacttgcagcagcaaaacacggctcctcaaattggaactgtcaacagccagggggccttacccggtatggtctggcagaaccgggacgtgtacctgcagggtcccatctgggccaagattcctcacacggacggcaacttccacccgtctccgctgatgggcggctttggcctgaaacatcctccgcctcagatcctgatcaagaacacgcctgtacctgcggatcctccgaccaccttcaaccagtcaaagctgaactctttcatcacgcaatacagcaccggacaggtcagcgtggaaattgaatgggagctgcagaaggaaaacagcaagcgctggaaccccgagatccagtacacctccaactactacaaatctacaagtgtggactttgctgttaatacagaaggcgtgtactctgaaccccgccccattggcacccgttacctcacccgtaatctgtaa

SEQ ID NO: 3780 - DNA, 2217 bp, Artificial Sequence
  source: /note="Description of Artificial Sequence: Synthetic polynucleotide"
atggctgccgatggttatcttccagattggctcgaggacaacctctctgagggcattcgcgagtggtgggcgctgaaacctggagccccgaagcccaaagccaaccagcaaaagcaggacgacggccggggtctggtgcttcctggctacaagtacctcggacccttcaacggactcgacaagggggagcccgtcaacgcggcggacgcggcggccctcgagcacgacaaggcctacgaccagcagctgcaggcgggtgacaatccgtacctgcggtataaccacgccgacgccgagtttcaggagcgtctgcaagaagatacgtcttttgggggcaacctcgggcgagcagtcttccaggccaagaagcgggttctcgaacctctcggtctggttgaggaaggcgctaagacggctcctggaaagaagagaccggtagagccatcaccccagcgttctccagactcctctacgggcatcggcaagaagggccaacagcccgccagaaaaagactcaattttggtcagactggcgactcagagtcagttccagaccctcaacctctcggagaacctccagcagcgccctctggtgtgggacctaatacaatggctgcaggcggtggcgcaccaatggcagacaataacgaaggcgccgacggagtgggtagttcctcgggaaattggcattgcgattccacatggctgggcgacagagtcatcaccaccagcacccgaacctgggccctgcccacctacaacaaccacctctacaagcaaatctccaacgggacatcgggaggagccaccaacgacaacacctacttcggctacagcaccccctgggggtattttgactttaacagattccactgccacttttcaccacgtgactggcagcgactcatcaacaacaactggggattccggcccaagagactcagcttcaagctcttcaacatccaggtcaaggaggtcacgcagaatgaaggcaccaagaccatcgccaataacctcaccagcaccatccaggtgtttacggactcggagtaccagctgccgtacgttctcggctctgcccaccagggctgcctgcctccgttcccggcggacgtgttcacgattccccagtacggctacctaacactcaacaacggtagtcaggccgtgggacgctcctccttctactgcctggaatactttccttcgcagatgctgagaaccggcaacaacttccagtttacttacaccttcgaggacgtgcctttccacagcagctacgcccacagccagagcttggaccggctgatgaatcctctgattgaccagtacctgtactacttgtctcggattcaaacaacaggaggcacggcaaatacgcaggctctgggcttcagccaaggtgggcctaatacaatggccaatcaggcaaagaactggctgccaggaccctgttaccgccaacaacgcgtctcaacgacaaccgggcaaaacaacaatagcaactttgcctggactgctgggaccaaataccatctgaatggaagaaattcattggctaatcctggcatcgctatggcaacacacaaagacgacgaggagcgtttttttcccagtaacgggatcctgatttttggcaaacaaaatgctgccagagacaatgcggattacagcgatgtcatgcccaccagcgaggaagaaatcaaaaccactaaccctgtggccacagaggaatacggtatcgtggcagataacttgcagcagcaaaacacggctcctcaaattggaactgtcaacagccagggggccttacccggtatggtctggcagaaccgggacgtgtacctgcagggtcccatctgggccaagattcctcacacggacggcaacttccacccgtctccgctgatgggcggctttggcctgaaacatcctccgcctcagatcctgatcaagaacacgcctgtacctgcggatcctccgaccaccttcaaccagtcaaagctgaactctttcatcacgcaatacagcaccggacaggtcagcgtggaaattgaatgggagctgcagaaggaaaacagcaagcgctggaaccccgagatccagtacacctccaactactacaaatctacaagtgtggactttgctgttaatacagaaggcgtgtactctgaaccccgccccattggcacccgttacctcacccgtaatctgtaa

SEQ ID NO: 3781 - DNA, 2217 bp, Artificial Sequence
  source: /note="Description of Artificial Sequence: Synthetic polynucleotide"
atggctgccgatggttatcttccagattggctcgaggacaacctctctgagggcattcgcgagtggtgggcgctgaaacctggagccccgaagcccaaagccaaccagcaaaagcaggacgacggccggggtctggtgcttcctggctacaagtacctcggacccttcaacggactcgacaagggggagcccgtcaacgcggcggacgcggcggccctcgagcacgacaaggcctacgaccagcagctgcaggcgggtgacaatccgtacctgcggtataaccacgccgacgccgagtttcaggagcgtctgcaagaagatacgtcttttgggggcaacctcgggcgagcagtcttccaggccaagaagcgggttctcgaacctctcggtctggttgaggaaggcgctaagacggctcctggaaagaagagaccggtagagccatcaccccagcgttctccagactcctctacgggcatcggcaagaagggccaacagcccgccagaaaaagactcaattttggtcagactggcgactcagagtcagttccagaccctcaacctctcggagaacctccagcagcgccctctggtgtgggacctaatacaatggctgcaggcggtggcgcaccaatggcagacaataacgaaggcgccgacggagtgggtagttcctcgggaaattggcattgcgattccacatggctgggcgacagagtcatcaccaccagcacccgaacctgggccctgcccacctacaacaaccacctctacaagcaaatctccaacgggacatcgggaggagccaccaacgacaacacctacttcggctacagcaccccctgggggtattttgactttaacagattccactgccacttttcaccacgtgactggcagcgactcatcaacaacaactggggattccggcccaagagactcagcttcaagctcttcaacatccaggtcaaggaggtcacgcagaatgaaggcaccaagaccatcgccaataacctcaccagcaccatccaggtgtttacggactcggagtaccagctgccgtacgttctcggctctgcccaccagggctgcctgcctccgttcccggcggacgtgttcacgattccccagtacggctacctaacactcaacaacggtagtcaggccgtgggacgctcctccttctactgcctggaatactttccttcgcagatgctgagaaccggcaacaacttccagtttacttacaccttcgaggacgtgcctttccacagcagctacgcccacagccagagcttggaccggctgatgaatcctctgattgaccagtacctgtactacttgtctcggattcaaacaacaggaggcacggcaaatacgcagactctgggcttcagccaaggtgggcctaatacaatggccaatcaggcaaagaactggctgccaggaccctgttaccgccaacaacgcgtctcaacgacaaccgggcaaaacaacaatagcaactttgcctggactgctgggaccaaataccatctgaatggaagaaattcattggctaatcctggcatcgctatggcaacacacaaagacgacgaggagcgtttttttcccagtaacgggatcctgatttttggcaaacaaaatgctgccagagacaatgcggattacagcgatgtcatgcccaccagcgaggaagaaatcaaaaccactaaccctgtggccacagagggatacggtatcgtggcagataacttgcagcagcaaaacacggctcctcaaattggaactgtcaacagccagggggccttacccggtatggtctggcagaaccgggacgtgtacctgcagggtcccatctgggccaagattcctcacacggacggcaacttccacccgtctccgctgatgggcggctttggcctgaaacatcctccgcctcagatcctgatcaagaacacgcctgtacctgcggatcctccgaccaccttcaaccagtcaaagctgaactctttcatcacgcaatacagcaccggacaggtcagcgtggaaattgaatgggagctgcagaaggaaaacagcaagcgctggaaccccgagatccagtacacctccaactactacaaatctacaagtgtggactttgctgttaatacagaaggcgtgtactctgaaccccgccccattggcacccgttacctcacccgtaatctgtaa

SEQ ID NO: 3782 - DNA, 2217 bp, Artificial Sequence
  source: /note="Description of Artificial Sequence: Synthetic polynucleotide"
atggctgccgatggttatcttccagattggctcgaggacaacctctctgagggcattcgcgagtggtgggcgctgaaacctggagccccgaagcccaaagccaaccagcaaaagcaggacgacggccggggtctggtgcttcctggctacaagtacctcggacccttcaacggactcgacaagggggagcccgtcaacgcggcggacgcggcggccctcgagcacgacaaggcctacgaccagcagctgcaggcgggtgacaatccgtacctgcggtataaccacgccgacgccgagtttcaggagcgtctgcaagaagatacgtcttttgggggcaacctcgggcgagcagtcttccaggccaagaagcgggttctcgaacctctcggtctggttgaggaaggcgctaagacggctcctggaaagaagagaccggtagagccatcaccccagcgttctccagactcctctacgggcatcggcaagaagggccaacagcccgccagaaaaagactcaattttggtcagactggcgactcagagtcagttccagaccctcaacctctcggagaacctccagcagcgccctctggtgtgggacctaatacaatggctgcaggcggtggcgcaccaatggcagacaataacgaaggcgccgacggagtgggtagttcctcgggaaattggcattgcgattccacatggctgggcgacagagtcatcaccaccagcacccgaacctgggccctgcccacctacaacaaccacctctacaagcaaatctccaacgggacatcgggaggagccaccaacgacaacacctacttcggctacagcaccccctgggggtattttgactttaacagattccactgccacttttcaccacgtgactggcagcgactcatcaacaacaactggggattccggcccaagagactcagcttcaagctcttcaacatccaggtcaaggaggtcacgcagaatgaaggcaccaagaccatcgccaataacctcaccagcaccatccaggtgtttacggactcggagtaccagctgccgtacgttctcggctctgcccaccagggctgcctgcctccgttcccggcggacgtgttcacgattccccagtacggctacctaacactcaacaacggtagtcaggccgtgggacgctcctccttctactgcctggaatactttccttcgcagatgctgagaaccggcaacaacttccagtttacttacaccttcgaggacgtgcctttccacagcagctacgcccacagccagagcttggaccggctgatgaatcctctgattgaccagtacctgtactacttgtctcggattcaaacaacaggaggcacggcaaatacgcagactctgggcttcagccaaggtgggcctaatacaatggccaatcaggcaaagaactggctgccaggaccctgttaccgccaacaacgcgtctcaacgacaaccgggcaaaacaacaatagcaactttgcctggactgctgggaccaaataccatctgaatggaagaaattcattggctaatcctggcatcgctatggcaacacgcaaagacgacgaggagcgtttttttcccagtaacgggatcctgatttttggcaaacaaaatgctgccagagacaatgcggattacagcgatgtcatgcccaccagcgaggaagaaatcaaaaccactaaccctgtggccacagaggaatacggtatcgtggcagataacttgcagcagcaaaacacggctcctcaaattggaactgtcaacagccagggggccttacccggtatggtctggcagaaccgggacgtgtacctgcagggtcccatctgggccaagattcctcacacggacggcaacttccacccgtctccgctgatgggcggctttggcctgaaacatcctccgcctcagatcctgatcaagaacacgcctgtacctgcggatcctccgaccaccttcaaccagtcaaagctgaactctttcatcacgcaatacagcaccggacaggtcagcgtggaaattgaatgggagctgcagaaggaaaacagcaagcgctggaaccccgagatccagtacacctccaactactacaaatctacaagtgtggactttgctgttaatacagaaggcgtgtactctgaaccccgccccattggcacccgttacctcacccgtaatctgtaa

SEQ ID NO: 3783 - DNA, 2217 bp, Artificial Sequence
  source: /note="Description of Artificial Sequence: Synthetic polynucleotide"
atggctgccgatggttatcttccagattggctcgaggacaacctctctgagggcattcgcgagtggtgggcgctgaaacctggagccccgaagcccaaagccaaccagcaaaagcaggacgacggccggggtctggtgcttcctggctacaagtacctcggacccttcaacggactcgacaagggggagcccgtcaacgcggcggacgcggcggccctcgagcacgacaaggcctacgaccagcagctgcaggcgggtgacaatccgtacctgcggtataaccacgccgacgccgagtttcaggagcgtctgcaagaagatacgtcttttgggggcaacctcgggcgagcagtcttccaggccaagaagcgggttctcgaacctctcggtctggttgaggaaggcgctaagacggctcctggaaagaagagaccggtagagccatcaccccagcgttctccagactcctctacgggcatcggcaagaagggccaacagcccgccagaaaaagactcaattttggtcagactggcgactcagagtcagttccagaccctcaacctctcggagaacctccagcagcgccctctggtgtgggacctaatacaatggctgcaggcggtggcgcaccaatggcagacaataacgaaggcgccgacggagtgggtagttcctcgggaaattggcattgcgattccacatggctgggcgacagagtcatcaccaccagcacccgaacctgggccctgcccacctacaacaaccacctctacaagcaaatctccaacgggacatcgggaggagccaccaacgacaacacctacttcggctacagcaccccctgggggtattttgactttaacagattccactgccacttttcaccacgtgactggcagcgactcatcaacaacaactggggattccggcccaagagactcagcttcaagctcttcaacatccaggtcaaggaggtcacgcagaatgaaggcaccaagaccatcgccaataacctcaccagcaccatccaggtgtttacggactcggagtaccagctgccgtacgttctcggctctgcccaccagggctgcctgcctccgttcccggcggacgtgttcacgattccccagtacggctacctaacactcaacaacggtagtcaggccgtgggacgctcctccttctactgcctggaatactttccttcgcagatgctgagaaccggcaacaacttccagtttacttacaccttcgaggacgtgcctttccacagcagctacgcccacagccagagcttggaccggctgatgaatcctctgattgaccagtacctgtactacttgtctcggattcaaacaacaggaggcacggcaaatacgcagactctgggcttcagccaaggtgggcctaatacaatggccaatcaggcaaagaactggctgccaggaccctgttaccgccaacaacgcgtctcaacgacaaccgggcaaaacaacaatagcaactttgcctggactgctgggaccaaataccatctgaatggaagaaattcattggctaatcctggcatcgctatggcaacacacaaagacgacgaggagcgtttttttcccagtaacgggatcctgatttttggcaaacaaaatgctgccagagacaatgcggattacagcgatgtcatgcccaccagcgaggaagaaatcaaaaccactaaccctgtggccacagaggaatacggtatcgtggcagataacttgcagcagcaaaacacggctcctcaaattggaactgtcaacagccagggggccttacccggtatggtctggcagaaccgggacgtgtacctgcagggtcccatctgggccaagattcctcacacggacggcaacttccacccgtctccgctgatgggcggctttggcctgaaacatcctccgcctcagatcctgatcaagaacacgcctgtacctgcggatcctccgaccaccttcaaccagtcaaagccgaactctttcatcacgcaatacagcaccggacaggtcagcgtggaaattgaatgggagctgcagaaggaaaacagcaagcgctggaaccccgagatccagtacacctccaactactacaaatctacaagtgtggactttgctgttaatacagaaggcgtgtactctgaaccccgccccattggcacccgttacctcacccgtaatctgtaa

SEQ ID NO: 3784 - DNA, 2217 bp, Artificial Sequence
  source: /note="Description of Artificial Sequence: Synthetic polynucleotide"
atggctgccgatggttatcttccagattggctcgaggacaacctctctgagggcattcgcgagtggtgggcgctgaaacctggagccccgaagcccaaagccaaccagcaaaagcaggacgacggccggggtctggtgcttcctggctacaagtacctcggacccttcaacggactcgacaagggggagcccgtcaacgcggcggacgcggcggccctcgagcacgacaaggcctacgaccagcagctgcaggcgggtgacaatccgtacctgcggtataaccacgccgacgccgagtttcaggagcgtctgcaagaagatacgtcttttgggggcaacctcgggcgagcagtcttccaggccaagaagcgggttctcgaacctctcggtctggttgaggaaggcgctaagacggctcctggaaagaagagaccggtagagccatcaccccagcgttctccagactcctctacgggcatcggcaagaagggccaacagcccgccagaaaaagactcaattttggtcagactggcgactcagagtcagttccagaccctcaacctctcggagaacctccagcagcgccctctggtgtgggacctaatacaatggctgcaggcggtggcgcaccaatggcagacaataacgaaggcgccgacggagtgggtagttcctcgggaaattggcattgcgattccacatggctgggcgacagagtcatcaccaccagcacccgaacctgggccctgcccacctacaacaaccacctctacaagcaaatctccaacgggacatcgggaggagccaccaacgacaacacctacttcggctacagcaccccctgggggtattttgactttaacagattccactgccacttttcaccacgtgactggcagcgactcatcaacaacaactggggattccggcccaagagactcagcttcaagctcttcaacatccaggtcaaggaggtcacgcagaatgaaggcaccaagaccatcgccaataacctcaccagcaccatccaggtgtttacggactcggagtaccagctgccgtacgttctcggctctgcccaccagggctgcctgcctccgttcccggcggacgtgttcacgattccccagtacggctacctaacactcaacaacggtagtcaggccgtgggacgctcctccttctactgcctggaatactttccttcgcagatgctgagaaccggcaacaacttccagtttacttacaccttcgaggacgtgcctttccacagcagctacgcccacagccagagcttggaccggctgatgaatcctctgattgaccagtacctgtactacttgtctcggattcaaacaacaggaggcacggcaaatacgcagactctgggcttcagccaaggtgggcctaatacaatggccaatcaggcaaagaactggctgccaggaccctgttaccgccaacaacgcgtctcaacgacaaccgggcaaaacaacaatagcaactttgcctggactgctgggaccaaataccatctgaatggaagaaattcattggctaatcctggcatcgctatggcaacacacaaagacgacgaggagcgttttttttccagtaacgggatcctgatttttggcaaacaaaatgctgccagagacaatgcggattacagcgatgtcatgcccaccagcgaggaagaaatcaaaaccactaaccctgtggccacagaggaatacggtatcgtggcagataacttgcagcagcaaaacacggctcctcaaattggaactgtcaacagccagggggccttacccggtatggtctggcagaaccgggacgtgtacctgcagggtcccatctgggccaagattcctcacacggacggcaacttccacccgtctccgctgatgggcggctttggcctgaaacatcctccgcctcagatcctgatcaagaacacgcctgtacctgcggatcctccgaccaccttcaaccagtcaaagctgaactctttcatcacgcaatacagcaccggacaggtcagcgtggaaattgaatgggagctgcagaaggaaaacagcaagcgctggaaccccgagatccagtacacctccaactactacaaatctacaagtgtggactttgctgttaatacagaaggcgtgtactctgaaccccgccccattggcacccgttacctcacccgtaatctgtaa

SEQ ID NO: 3785 - DNA, 2217 bp, Artificial Sequence
  source: /note="Description of Artificial Sequence: Synthetic polynucleotide"
atggctgccgatggttatcttccagattggctcgaggacaacctctctgagggcattcgcgagtggtgggcgctgaaacctggagccccgaagcccaaagccaaccagcaaaagcaggacgacggccggggtctggtgcttcctggctacaagtacctcggacccttcaacggactcgacaagggggagcccgtcaacgcggcggacgcggcggccctcgagcacgacaaggcctacgaccagcagctgcaggcgggtgacaatccgtacctgcggtataaccacgccgacgccgagtttcaggagcgtctgcaagaagatacgtcttttgggggcaacctcgggcgagcagtcttccaggccaagaagcgggttctcgaacctctcggtctggttgaggaaggcgctaagacggctcctggaaagaagagaccggtagagccatcaccccagcgttctccagactcctctacgggcatcggcaagaagggccaacagcccgccagaaaaagactcaattttggtcagactggcgactcagagtcagttccagaccctcaacctctcggagaacctccagcagcgccctctggtgtgggacctaatacaatggctgcaggcggtggcgcaccaatggcagacaataacgaaggcgccgacggagtgggtagttcctcgggaaattggcattgcgattccacatggctgggcgacagagtcatcaccaccagcacccgaacctgggccctgcccacctacaacaaccacctctacaagcaaatctccaacgggacatcgggaggagccaccaacgacaacacctacttcggctacagcaccccctgggggtattttgactttaacagattccactgccacttttcaccacgtgactggcagcgactcatcaacaacaactggggattccggcccaagagactcagcttcaagctcttcaacatccaggtcaaggaggtcacgcagaatgaaggcaccaagaccatcgccaataacctcaccagcaccatccaggtgtttacggactcggagtaccagctgccgtacgttctcggctctgcccaccagggctgcctgcctccgttcccggcggacgtgttcacgattccccagtacggctacctaacactcaacaacggtagtcaggccgtgggacgctcctccttctactgcctggaatactttccttcgcagatgctgagaaccggcaacaacttccagtttacttacaccttcgaggacgtgcctttccacagcagctacgcccacagccagagcttggaccggctgatgaatcctctgattgaccagtacctgtactacttgtctcggattcaaacaacaggaggcacggcaaatacgcagactctgggcttcagccaaggtgggcctaatacaatggccaatcaggcaaagaactggctgccaggaccctgttaccgccaacaacgcgtctcaacgacaaccgggcaaaacaacaatagcaactttgcctgggctgctgggaccaaataccatctgaatggaagaaattcattggctaatcctggcatcgctatggcaacacacaaagacgacgaggagcgtttttttcccagtaacgggatcctgatttttggcaaacaaaatgctgccagagacaatgcggattacagcgatgtcatgcccaccagcgaggaagaaatcaaaaccactaaccctgtggccacagaggaatacggtatcgtggcagataacttgcagcagcaaaacacggctcctcaaattggaactgtcaacagccagggggccttacccggtatggtctggcagaaccgggacgtgtacctgcagggtcccatctgggccaagattcctcacacggacggcaacttccacccgtctccgctgatgggcggctttggcctgaaacatcctccgcctcagatcctgatcaagaacacgcctgtacctgcggatcctccgaccaccttcaaccagtcaaagctgaaccctttcatcacgcaatacagcaccggacaggtcagcgtggaaattgaatgggagctgcagaaggaaaacagcaagcgctggaaccccgagatccagtacacctccaactactacaaatctacaagtgtggactttgctgttaatacagaaggcgtgtactctgaaccccgccccattggcacccgttacctcacccgtaatctgtaa

SEQ ID NO: 3786 - DNA, 2217 bp, Artificial Sequence
  source: /note="Description of Artificial Sequence: Synthetic polynucleotide"
atggctgccgatggttatcttccagattggctcgaggacaacctctctgagggcattcgcgagtggtgggcgctgaaacctggagccccgaagcccaaagccaaccagcaaaagcaggacgacggccggggtctggtgcttcctggctacaagtacctcggacccttcaacggactcgacaagggggagcccgtcaacgcggcggacgcggcggccctcgagcacgacaaggcctacgaccagcagctgcaggcgggtgacaatccgtacctgcggtataaccacgccgacgccgagtttcaggagcgtctgcaagaagatacgtcttttgggggcaacctcgggcgagcagtcttccaggccaagaagcgggttctcgaacctctcggtctggttgaggaaggcgctaagacggctcctggaaagaagagaccggtagagccatcaccccagcgttctccagactcctctacgggcatcggcaagaagggccaacagcccgccagaaaaagactcaattttggtcagactggcgactcagagtcagttccagaccctcaacctctcggagaacctccagcagcgccctctggtgtgggacctaatacaatggctgcaggcggtggcgcaccaatggcagacaataacgaaggcgccgacggagtgggtagttcctcgggaaattggcattgcgattccacatggctgggcgacagagtcatcaccaccagcacccgaacctgggccctgcccacctacaacaaccacctctacaagcaaatctccaacgggacatcgggaggagccaccaacgacaacacctacttcggctacagcaccccctgggggtattttgactttaacagattccactgccacttttcaccacgtgactggcagcgactcatcaacaacaactggggattccggcccaagagactcagcttcaagctcttcaacatccaggtcaaggaggtcacgcagaatgaaggcaccaagaccatcgccaataaccccaccagcaccatccaggtgtttacggactcggagtaccagctgccgtacgttctcggctctgcccaccagggctgcctgcctccgttcccggcggacgtgttcacgattccccagtacggctacctaacactcaacaacggtagtcaggccgtgggacgctcctccttctactgcctggaatactttccttcgcagatgctgagaaccggcaacaacttccagtttacttacaccttcgaggacgtgcctttccacagcagctacgcccacagccagagcttggaccggctgatgaatcctctgattgaccagtacctgtactacttgtctcggattcaaacaacaggaggcacggcaaatacgcagactctgggcttcagccaaggtgggcctaatacaatggccaatcaggcaaagaactggctgccaggaccctgttaccgccaacaacgcgtctcaacgacaaccgggcaaaacaacaatagcaactttgcctggactgctgggaccaaataccatctgaatggaagaaattcattggctaatcctggcatcgctatggcaacacacaaagacgacgaggagcgtttttttcccagtaacgggatcctgatttttggcaaacaaaatgctgccagagacaatgcggattacagcgatgtcatgcccaccagcgaggaagaaatcaaaaccactaaccctgtggccacagaggaatacggtatcgtggcggataacttgcagcagcaaaacacggctcctcaaattggaactgtcaacagccagggggccttacccggtatggtctggcagaaccgggacgtgtacctgcagggtcccatctgggccaagattcctcacacggacggcaacttccacccgtctccgctgatgggcggctttggcctgaaacatcctccgcctcagatcctgatcaagaacacgcctgtacctgcggatcctccgaccaccttcaaccagtcaaagctgaactctttcatcacgcaatacagcaccggacaggtcagcgtggaaattgaatgggagctgcagaaggaaaacagcaagcgctggaaccccgagatccagtacacctccaactactacaaatctacaagtgtggactttgctgttaatacagaaggcgtgtactctgaaccccgccccattggcacccgttacctcacccgtaatctgtaa

SEQ ID NO: 3787 - DNA, 2217 bp, Artificial Sequence
  source: /note="Description of Artificial Sequence: Synthetic polynucleotide"
atggctgccgatggttatcttccagattggctcgaggacaacctctctgagggcattcgcgagtggtgggcgctgaaacctggagccccgaagcccaaagccaaccagcaaaagcaggacgacggccggggtctggtgcttcctggctacaagtacctcggacccttcaacggactcgacaagggggagcccgtcaacgcggcggacgcggcggccctcgagcacgacaaggcctacgaccagcagctgcaggcgggtgacaatccgtacctgcggtataaccacgccgacgccgagtttcaggagcgtctgcaagaagatacgtcttttgggggcaacctcgggcgagcagtcttccaggccaagaagcgggttctcgaacctctcggtctggttgaggaaggcgctaagacggctcctggaaagaagagaccggtagagccatcaccccagcgttctccagactcctctacgggcatcggcaagaagggccaacagcccgccagaaaaagactcaattttggtcagactggcgactcagagtcagttccagaccctcaacctctcggagaacctccagcagcgccctctggtgtgggacctaatacaatggctgcaggcggtggcgcaccaatggcagacaataacgaaggcgccgacggagtgggtagttcctcgggaaattggcattgcgattccacatggctgggcgacagagtcatcaccaccagcacccgaacctgggccctgcccacctacaacaaccacctctacaagcaaatctccaacgggacatcgggaggagccaccaacgacaacacctacttcggctacagcaccccctgggggtattttgactttaacagattccactgccgcttttcaccacgtgactggcagcgactcatcaacaacaactggggattccggcccaagagactcagcttcaagctcttcaacatccaggtcaaggaggtcacgcagaatgaaggcaccaagaccatcgccaataacctcaccagcaccatccaggtgtttacggactcggagtaccagctgccgtacgttctcggctctgcccaccagggctgcctgcctccgttcccggcggacgtgttcacgattccccagtacggctacctaacactcaacaacggtagtcaggccgtgggacgctcctccttctactgcctggaatactttccttcgcagatgctgagaaccggcaacaacttccagtttacttacaccttcgaggacgtgcctttccacagcagctacgcccacagccagagcttggaccggctgatgaatcctctgattgaccagtacctgtactacttgtctcggattcaaacaacaggaggcacggcaaatacgcagactctgggcttcagccaaggtgggcctaatacaatggccaatcaggcaaagaactggctgccaggaccctgttaccgccaacaacgcgtctcaacgacaaccgggcaaaacaacaatagcaactttgcctggactgctgggaccaaataccatctgaatggaagaaattcattggctaatcctggcatcgctatggcaacacacaaagacgacgaggagcgtttttttcccagtaacgggatcctgatttttggcaaacaaaatgctgccagagacaatgcggattacagcgatgtcatgcccaccagcgaggaagaaatcaaaaccactaaccctgtggccacagaggaatacggtatcgtggcagataacttgcagcagcaaaacacggctcctcaaattggaactgtcaacagccagggggccttacccggtatggtctggcagaaccgggacgtgtacctgcagggtcccatctgggccaagattcctcacacggacggcaacttccacccgtctccgctgatgggcggctttggcctgaaacatcctccgcctcagatcctgatcaagaacacgcctgtacctgcggatcctccgaccaccttcaaccagtcaaagctgaactctttcatcacgcaatacagcaccggacaggtcagcgtggaaattgaatgggagctgcagaaggaaaacagcaagcgctggaaccccgagatccagtacacctccaactactacaaatctacaagtgtggactttgctgttaatacagaaggcgtgtactctgaaccccgccccattggcacccgttacctcacccgtaatctgtaa

SEQ ID NO: 3788 - DNA, 2217 bp, Artificial Sequence
  source: /note="Description of Artificial Sequence: Synthetic polynucleotide"
atggctgccgatggttatcttccagattggctcgaggacaacctctctgagggcattcgcgagtggtgggcgctgaaacctggagccccgaagcccaaagccaaccagcaaaagcaggacgacggccggggtctggtgcttcctggctacaagtacctcggacccttcaacggactcgacaagggggagcccgtcaacgcggcggacgcggcggccctcgagcacgacaaggcctacgaccagcagctgcaggcgggtgacaatccgtacctgcggtataaccacgccgacgccgagtttcaggagcgtctgcaagaagatacgtcttttgggggcaacctcgggcgagcagtcttccaggccaagaagcgggttctcgaacctctcggtctggttgaggaaggcgctaagacggctcctggaaagaagagaccggtagagccatcaccccagcgttctccagactcctctacgggcatcggcaagaagggccaacagcccgccagaaaaagactcaattttggtcagactggcgactcagagtcagttccagaccctcaacctctcggagaacctccagcagcgccctctggtgtgggacctaatacaatggctgcaggcggtggcgcaccaatggcagacaataacgaaggcgccgacggagtgggtagttcctcgggaaattggcattgcgattccacatggctgggcgacagagtcatcaccaccagcacccgaacctgggccctgcccacctacaacaaccacctctacaagcaaatctccaacgggacatcgggaggagccaccaacgacaacacctacttcggctacagcaccccctgggggtattttgactttaacagattccactgccacttttcaccacgtgactggcagcgactcatcaacaacaactggggattccggcccaagagactcagcttcaagctcttcaacatccaggtcaaggaggtcacgcagaatgaaggcaccaagaccatcgccaataacctcaccagcaccatccaggtgtttacggactcggagtaccagctgccgtacgttctcggctctgcccaccagggctgcctgcctccgttcccggcggacgtgttcacgattccccagtacggctacctaacactcaacaacggtagtcaggccgtgggacgctcctccttctactgcctggaatactttccttcgcagatgctgagaaccggcaacaacttccagtttacttacaccttcgaggacgtgcctttccacagcagctacgcccacagccagagcttggaccggctgatgaatcctctgattgaccagtacctgtactacttgtctcggattcaaacaacaggaggcacggcaaatacgcagactctgggcttcagccaaggtgggcctaatacaatggccaatcaggcaaagaactggctgccaggaccctgttaccgccaacaacgcgtctcaacgacaaccgggcaaaacaacaatagcaactttgcctggactgctgggaccaaataccatctgaatggaagaaattcattggctaatcctggcatcgctatggcaacacacaaagacgacgaggagcgtttttttcccagtaacgggatcctgatttttggcaaacaaaatgctgccagagacaatgcggattacagcgatgtcatgcccaccagcgaggaagaaatcaaaaccactaaccctgtggccacagaggaatacggtatcgtggcagataacttgcagcagcaaaacgcggctcctcaaattggaactgtcaacagccagggggccttacccggtatggtctggcagaaccgggacgtgtacctgcagggtcccatctgggccaagattcctcacacggacggcaacttccacccgtctccgctgatgggcggctttggcctgaaacatcctccgcctcagatcctgatcaagaacacgcctgtacctgcggatcctccgaccaccttcaaccagtcaaagctgaactctttcatcacgcaatacagcaccggacaggtcagcgtggaaattgaatgggagctgcagaaggaaaacagcaagcgctggaaccccgagatccagtacacctccaactactacaaatctacaagtgtggactttgctgttaatacagaaggcgtgtactctgaaccccgccccattggcacccgttacctcacccgtaatctgtaa

SEQ ID NO: 3789 - DNA, 2217 bp, Artificial Sequence
  source: /note="Description of Artificial Sequence: Synthetic polynucleotide"
atggctgccgatggttatcttccagattggctcgaggacaacctctctgagggcattcgcgagtggtgggcgctgaaacctggagccccgaagcccaaagccaaccagcaaaagcaggacgacggccggggtctggtgcttcctggctacaagtacctcggacccttcaacggactcgacaagggggagcccgtcaacgcggcggacgcggcggccctcgagcacgacaaggcctacgaccagcagctgcaggcgggtgacaatccgtacctgcggtataaccacgccgacgccgagtttcaggagcgtctgcaagaagatacgtcttttgggggcaacctcgggcgagcagtcttccaggccaagaagcgggttctcgaacctctcggtctggttgaggaaggcgctaagacggctcctggaaagaagagaccggtagagccatcaccccagcgttctccagactcctctacgggcatcggcaagaagggccaacagcccgccagaaaaagactcaattttggtcagactggcgactcagagtcagttccagaccctcaacctctcggagaacctccagcagcgccctctggtgtgggacctaatacaatggctgcaggcggtggcgcaccaatggcagacaataacgaaggcgccgacggagtgggtagttcctcgggaaattggcattgcgattccacatggctgggcgacagagtcatcaccaccagcacccgaacctgggccctgcccacctacaacaaccacctctacaagcaaatctccaacgggacatcgggaggagccaccaacgacaacacctacttcggctacagcaccccctgggggtattttgactttaacagattccactgccacttttcaccacgtgactggcagcgactcatcaacaacaactggggattccggcccaagagactcagcttcaagctcttcaacatccaggtcaaggaggtcacgcagaatgaaggcaccaagaccatcgccaatagcctcaccagcaccatccaggtgtttacggactcggagtaccagctgccgtacgttctcggctctgcccaccagggctgcctgcctccgttcccggcggacgtgttcacgattccccagtacggctacctaacactcaacaacggtagtcaggccgtgggacgctcctccttctactgcctggaatactttccttcgcagatgctgagaaccggcaacaacttccagtttacttacaccttcgaggacgtgcctttccacagcagctacgcccacagccagagcttggaccggctgatgaatcctctgattgaccagtacctgtactacttgtctcggattcaaacaacaggaggcacggcaaatacgcagactctgggcttcagccaaggtgggcctaatacaatggccaatcaggcaaagaactggctgccaggaccctgttaccgccaacaacgcgtctcaacgacaaccgggcaaaacaacaatagcaactttgcctggactgctgggaccaaataccatctgaatggaagaaattcattggctaatcctggcatcgctatggcaacacacaaagacgacgaggagcgtttttttcccagtaacgggatcctgatttttggcaaacaaaatgctgccagagacaatgcggattacagcgatgtcatgcccaccagcgaggaagaaatcaaaaccactaaccctgtggccacagaggaatacggtatcgtggcagataacttgcagcagcaaaacacggctcctcaaattggaactgtcaacagccagggggccttacccggtatggtctggcagaaccgggacgtgtacctgcagggtcccatctgggccaagattcctcacacggacggcaacttccacccgtctccgctgatgggcggctttggcctgaaacatcctccgcctcagatcctgatcaagaacacgcctgtacctgcggatcctccgaccaccttcaaccagtcaaagctgaactctttcatcacgcaatacagcaccggacaggtcagcgtggaaattgaatgggagctgcagaaggaaaacagcaagcgctggaaccccgagatccagtacacctccaactactacaaatctgcaagtgtggactttgctgttaatacagaaggcgtgtactctgaaccccgccccattggcacccgttacctcacccgtaatctgtaa

SEQ ID NO: 3790 - DNA, 2217 bp, Artificial Sequence
  source: /note="Description of Artificial Sequence: Synthetic polynucleotide"
atggctgccgatggttatcttccagattggctcgaggacaacctctctgagggcattcgcgagtggtgggcgctgaaacctggagccccgaagcccaaagccaaccagcaaaagcaggacgacggccggggtctggtgcttcctggctacaagtacctcggacccttcaacggactcgacaagggggagcccgtcaacgcggcggacgcggcggccctcgagcacgacaaggcctacgaccagcagctgcaggcgggtgacaatccgtacctgcggtataaccacgccgacgccgagtttcaggagcgtctgcaagaagatacgtcttttgggggcaacctcgggcgagcagtcttccaggccaagaagcgggttctcgaacctctcggtctggttgaggaaggcgctaagacggctcctggaaagaagagaccggtagagccatcaccccagcgttctccagactcctctacgggcatcggcaagaagggccaacagcccgccagaaaaagactcaattttggtcagactggcgactcagagtcagttccagaccctcaacctctcggagaacctccagcagcgccctctggtgtgggacctaatacaatggctgcaggcggtggcgcaccaatggcagacaataacgaaggcgccgacggagtgggtagttcctcgggaaattggcattgcgattccacatggctgggcgacagagtcatcaccaccagcacccgaacctgggccctgcccacctacaacaaccacctctacaagcaaatctccaacgggacatcgggaggagccaccaacgacaacacctacttcggctacagcaccccctgggggtattttgactttaacagattccactgccacttttcaccacgtgactggcagcgactcatcaacaacaactggggattccggcccaagagactcagcttcaagctcttcaacatccaggtcaaggaggtcacgcagaatgaaggcaccaagaccatcgccaataacctcaccagcaccatccaggtgtttacggactcggagtaccagctgccgtacgttctcggctctgcccaccagggctgcctgcctccgttcccggcggacgtgttcacgattccccagtacggctacctaacactcaacaacggtagtcaggccgtgggacgctcctccttctactgcctggaatactttccttcgcagatgctgagaaccggcaacaacttccagtttacttacaccttcgaggacgtgcctttccacagcagctacgcccacagccagagcttggaccggctgatgaatcctctgattgaccagtacctgtactacttgtctcggattcaaacaacaggaggcacggcaaatacgcagactctgggcttcagccaaggtgggcctaatacaatggccaatcaggcaaagaactggctgccaggaccctgttaccgccaacaacgcgtctcaacgacaaccgggcaaaacaacaatagcaactttgcctggactgctgggaccaaataccatctgaatggaggaaattcattggctaatcctggcatcgctatggcaacacacaaagacgacgaggagcgtttttttcccagtaacgggatcctgatttttggcaaacaaaatgctgccagagacaatgcggattacagcgatgtcatgcccaccagcgaggaagaaatcaaaaccactaaccctgtggccacagaggaatacggtatcgtggcagataacttgcagcagcaaaacacggctcctcaaattggaactgtcaacagccagggggccttacccggtatggtctggcagaaccgggacgtgtacctgcagggtcccatctgggccaagattcctcacacggacggcaacttccacccgtctccgctgatgggcggctttggcctgaaacatcctccgcctcagatcctgatcaagaacacgcctgtacctgcggatcctccgaccaccttcaaccagtcaaagctgaactctttcatcacgcaatacagcaccggacaggtcagcgtggaaattgaatgggagctgcagaaggaaaacagcaagcgctggaaccccgagatccagtacacctccaactactacaaatctacaagtgtggactttgctgttaatacagaaggcgtgtactctgaaccccgccccattggcacccgttacctcacccgtaatctgtaa

SEQ ID NO: 3791 - DNA, 2217 bp, Artificial Sequence
  source: /note="Description of Artificial Sequence: Synthetic polynucleotide"
atggctgccgatggttatcttccagattggctcgaggacaacctctctgagggcattcgcgagtggtgggcgctgaaacctggagccccgaagcccaaagccaaccagcaaaagcaggacgacggccggggtctggtgcttcctggctacaagtacctcggacccttcaacggactcgacaagggggagcccgtcaacgcggcggacgcggcggccctcgagcacgacaaggcctacgaccagcagctgcaggcgggtgacaatccgtacctgcggtataaccacgccgacgccgagtttcaggagcgtctgcaagaagatacgtcttttgggggcaacctcgggcgagcagtcttccaggccaagaagcgggttctcgaacctctcggtctggttgaggaaggcgctaagacggctcctggaaagaagagaccggtagagccatcaccccagcgttctccagactcctctacgggcatcggcaagaagggccaacagcccgccagaaaaagactcaattttggtcagactggcgactcagagtcagttccagaccctcaacctctcggagaacctccagcagcgccctctggtgtgggacctaatacaatggctgcaggcggtggcgcaccaatggcagacaataacgaaggcgccgacggagtgggtagttcctcgggaaattggcattgcgattccacatggctgggcgacagagtcatcaccaccagcacccgaacctgggccctgcccacctacaacaaccacctctacaagcaaatctccaacgggacatcgggaggagccaccaacgacaacacctacttcggctacagcaccccctgggggtattttgactttaacagattccactgccacttttcaccacgtgactggcagcgactcatcaacaacaactggggattccggcccaagagactcagcttcaagctcttcaacatccaggtcaaggaggtcacgcagaatgaaggcaccaagaccatcgccaataacctcaccagcaccatccaggtgtttacggactcggagtaccagctgccgtacgttctcggctctgcccaccagggctgcctgcctccgttcccggcggacgtgttcacgattccccagtacggctacctaacactcaacaacggtagtcaggccgtgggacgctcctccttctactgcctggaatactttccttcgcagatgctgagaaccggcaacaacttccagtttacttacaccttcgaggacgtgcctttccacagcagctacgcccacagccagagcttggaccggctgatgaatcctctgattgaccagtacctgtactacttgtctcggattcaaacaacaggaggcacggcaaatacgcagactctgggcttcagccaaggtgggcctaatacaatggccaatcaggcaaagaactggctgccaggaccctgttaccgccaacaacgcgtctcaacgacaaccgggcaaaacaacaatagcaactttgcctggactgctgggaccaaataccatctgaatggaagaaattcattggctaatcctggcatcgctatggcaacacacaaagacgacgaggagcgtttttttcccagtaacgggatcctgatttttggcaaacaaaatgctgccagagacaatgcggattacagcgatgtcatgcccaccagcgaggaagaaatcaaaaccactaaccctgtggccacagaggaatacggtatcgtggcagataacttgcagcagcaaaacacggctcctcaaattggaactgtcaacagccagggggccttacccggtatggtctggcagaaccgggacgtgtacctgcagggtcccatctgggccaagattcctcacacggacggcaacttccacccgtctccgctgatgggcggctttggcctgaaacatcctccgcctcagatcctgatcaagaacacgcctgtacctgcggatcctccgaccaccttcaaccagtcaaggctgaactctttcatcacgcaatacagcaccggacaggtcagcgtggaaattgaatgggagctgcagaaggaaaacagcaagcgctggaaccccgagatccagtacacctccaactactacaaatctacaagtgtggactttgctgttaatacagaaggcgtgtactctgaaccccgccccattggcacccgttacctcacccgtaatctgtaa

SEQ ID NO: 3792 - DNA, 2217 bp, Artificial Sequence
  source: /note="Description of Artificial Sequence: Synthetic polynucleotide"
atggctgccgatggttatcttccagattggctcgaggacaacctctctgagggcattcgcgagtggtgggcgctgaaacctggagccccgaagcccaaagccaaccagcaaaagcaggacgacggccggggtctggtgcttcctggctacaagtacctcggacccttcaacggactcgacaagggggagcccgtcaacgcggcggacgcggcggccctcgagcacgacaaggcctacgaccagcagctgcaggcgggtgacaatccgtacctgcggtataaccacgccgacgccgagtttcaggagcgtctgcaagaagatacgtcttttgggggcaacctcgggcgagcagtcttccaggccaagaagcgggttctcgaacctctcggtctggttgaggaaggcgctaagacggctcctggaaagaagagaccggtagagccatcaccccagcgttctccagactcctctacgggcatcggcaagaagggccaacagcccgccagaaaaagactcaattttggtcagactggcgactcagagtcagttccagaccctcaacctctcggagaacctccagcagcgccctctggtgtgggacctaatacaatggctgcaggcggtggcgcaccaatggcagacaataacgaaggcgccgacggagtgggtagttcctcgggaaattggcattgcgattccacatggctgggcgacagagtcatcaccaccagcacccgaacctgggccctgcccacctacaacaaccacctctacaagcaaatctccaacgggacatcgggaggagccgccaacgacaacacctacttcggctacagcaccccctgggggtattttgactttaacagattccactgccacttttcaccacgtgactggcagcgactcatcaacaacaactggggattccggcccaagagactcagcttcaagctcttcaacatccaggtcaaggaggtcacgcagaatgaaggcaccaagaccatcgccaataacctcaccagcaccatccaggtgtttacggactcggagtaccagctgccgtacgttctcggctctgcccaccagggctgcctgcctccgttcccggcggacgtgttcacgattccccagtacggctacctaacactcaacaacggtagtcaggccgtgggacgctcctccttctactgcctggaatactttccttcgcagatgctgagaaccggcaacaacttccagtttacttacaccttcgaggacgtgcctttccacagcagctacgcccacagccagagcttggaccggctgatgaatcctctgattgaccagtacctgtactacttgtctcggattcaaacaacaggaggcacggcaaatacgcagactctgggcttcagccaaggtgggcctaatacaatggccaatcaggcaaagaactggctgccaggaccctgttaccgccaacaacgcgtctcaacgacaaccgggcaaaacaacaatagcaactttgcctggactgctgggaccaaataccatctgaatggaagaaattcattggctaatcctggcatcgctatggcaacacacaaagacgacgaggagcgtttttttcccagtaacgggatcctgatttttggcaaacaaaatgctgccagagacaatgcggattacagcgatgtcatgcccaccagcgaggaagaaatcaaaaccactaaccctgtggccacagaggaatacggtatcgtggcagataacttgcagcagcaaaacacggctcctcaaattggaactgtcaacagccagggggccttacccggtatggtctggcagaaccgggacgtgtacctgcagggtcccatctgggccaagattcctcacacggacggcaacttccacccgtctccgctgatgggcggctttggcctgaaacatcctccgcctcagatcctgatcaagaacacgcctgtacctgcggatcctccgaccaccttcaaccagtcaaagctgaactctttcatcacgcaatacagcaccggacaggtcagcgtggaaattgaatgggagctgcagaaggaaaacagcaagcgctggaaccccgagatccagtacacctccaactactacaaatctacaagtgtggactttgctgttaatacagaaggcgtgtactctgaaccccgccccattggcacccgttacctcacccgtaatctgtaa

SEQ ID NO: 3793 - DNA, 2217 bp, Artificial Sequence
  source: /note="Description of Artificial Sequence: Synthetic polynucleotide"
atggctgccgatggttatcttccagattggctcgaggacaacctctctgagggcattcgcgagtggtgggcgctgaaacctggagccccgaagcccaaagccaaccagcaaaagcaggacgacggccggggtctggtgcttcctggctacaagtacctcggacccttcaacggactcgacaagggggagcccgtcaacgcggcggacgcggcggccctcgagcacgacaaggcctacgaccagcagctgcaggcgggtgacaatccgtacctgcggtataaccacgccgacgccgagtttcaggagcgtctgcaagaagatacgtcttttgggggcaacctcgggcgagcagtcttccaggccaagaagcgggttctcgaacctctcggtctggttgaggaaggcgctaagacggctcctggaaagaagagaccggtagagccatcaccccagcgttctccagactcctctacgggcatcggcaagaagggccaacagcccgccagaaaaagactcaattttggtcagactggcgactcagagtcagttccagaccctcaacctctcggagaacctccagcagcgccctctggtgtgggacctaatacaatggctgcaggcggtggcgcaccaatggcaggcaataacgaaggcgccgacggagtgggtagttcctcgggaaattggcattgcgattccacatggctgggcgacagagtcatcaccaccagcacccgaacctgggccctgcccacctacaacaaccacctctacaagcaaatctccaacgggacatcgggaggagccaccaacgacaacacctacttcggctacagcaccccctgggggtattttgactttaacagattccactgccacttttcaccacgtgactggcagcgactcatcaacaacaactggggattccggcccaagagactcagcttcaagctcttcaacatccaggtcaaggaggtcacgcagaatgaaggcaccaagaccatcgccaataacctcaccagcaccatccaggtgtttacggactcggagtaccagctgccgtacgttctcggctctgcccaccagggctgcctgcctccgttcccggcggacgtgttcacgattccccagtacggctacctaacactcaacaacggtagtcaggccgtgggacgctcctccttctactgcctggaatactttccttcgcagatgctgagaaccggcaacaacttccagtttacttacaccttcgaggacgtgcctttccacagcagctacgcccacagccagagcttggaccggctgatgaatcctctgattgaccagtacctgtactacttgtctcggattcaaacaacaggaggcacggcaaatacgcagactctgggcttcagccaaggtgggcctaatacaatggccaatcaggcaaagaactggctgccaggaccctgttaccgccaacaacgcgtctcaacgacaaccgggcaaaacaacaatagcaactttgcctggactgctgggaccaaataccatctgaatggaagaaattcattggctaatcctggcatcgctatggcaacacacaaagacgacgaggagcgtttttttcccagtaacgggatcctgatttttggcaaacaaaatgctgccagagacaatgcggattacagcgatgtcatgcccaccagcgaggaagaaatcaaaaccactaaccctgtggccacagaggaatacggtatcgtggcagataacttgcagcagcaaaacacggctcctcaaattggaactgtcaacagccagggggccttacccggtatggtctggcagaaccgggacgtgtacctgcagggtcccatctgggccaagattcctcacacggacggcaacttccacccgtctccgctgatgggcggctttggcctgaaacatcctccgcctcagatcctgatcaagaacacgcctgtacctgcggatcctccgaccaccttcaaccagtcaaagctgaactctttcatcacgcaatacagcaccggacaggtcagcgtggaaattgaatgggagctgcagaaggaaaacagcaagcgctggaaccccgagatccagtacacctccaactactacaaatctacaagtgtggactttgctgttaatacagaaggcgtgtactctgaaccccgccccattggcacccgttacctcacccgtaatctgtaa

SEQ ID NO: 3794 - DNA, 2217 bp, Artificial Sequence
  source: /note="Description of Artificial Sequence: Synthetic polynucleotide"
atggctgccgatggttatcttccagattggctcgaggacaacctctctgagggcattcgcgagtggtgggcgctgaaacctggagccccgaagcccaaagccaaccagcaaaagcaggacgacggccggggtctggtgcttcctggctacaagtacctcggacccttcaacggactcgacaagggggagcccgtcaacgcggcggacgcggcggccctcgagcacgacaaggcctacgaccagcagctgcaggcgggtgacaatccgtacctgcggtataaccacgccgacgccgagtttcaggagcgtctgcaagaagatacgtcttttgggggcaacctcgggcgagcagtcttccaggccaagaagcgggttctcgaacctctcggtctggttgaggaaggcgctaagacggctcctggaaagaagagaccggtagagccatcaccccagcgttctccagactcctctacgggcatcggcaggaagggccaacagcccgccagaaaaagactcaattttggtcagactggcgactcagagtcagttccagaccctcaacctctcggagaacctccagcagcgccctctggtgtgggacctaatacaatggctgcaggcggtggcgcaccaatggcagacaataacgaaggcgccgacggagtgggtagttcctcgggaaattggcattgcgattccacatggctgggcgacagagtcatcaccaccagcacccgaacctgggccctgcccacctacaacaaccacctctacaagcaaatctccaacgggacatcgggaggagccaccaacgacaacacctacttcggctacagcaccccctgggggtattttgactttaacagattccactgccacttttcaccacgtgactggcagcgactcatcaacaacaactggggattccggcccaagagactcagcttcaagctcttcaacatccaggtcaaggaggtcacgcagaatgaaggcaccaagaccatcgccaataacctcaccagcaccatccaggtgtttacggactcggagtaccagctgccgtacgttctcggctctgcccaccagggctgcctgcctccgttcccggcggacgtgttcacgattccccagtacggctacctaacactcaacaacggtagtcaggccgtgggacgctcctccttctactgcctggaatactttccttcgcagatgctgagaaccggcaacaacttccagtttacttacaccttcgaggacgtgcctttccacagcagctacgcccacagccagagcttggaccggctgatgaatcctctgattgaccagtacctgtactacttgtctcggattcaaacaacaggaggcacggcaaatacgcagactctgggcttcagccaaggtgggcctaatacaatggccaatcaggcaaagaactggctgccaggaccctgttaccgccaacaacgcgtctcaacgacaaccgggcaaaacaacaatagcaactttgcctggactgctgggaccaaataccatctgaatggaagaaattcattggctaatcctggcatcgctatggcaacacacaaagacgacgaggagcgtttttttcccagtaacgggatcctgatttttggcaaacaaaatgctgccagagacaatgcggattacagcgatgtcatgcccaccagcgaggaagaaatcaaaaccactaaccctgtggccacagaggaatacggtatcgtggcagataacttgcagcagcaaaacacggctcctcaaattggaactgtcaacagccagggggccttacccggtatggtctggcagaaccgggacgtgtacctgcagggtcccatctgggccaagattcctcacacggacggcaacttccacccgtctccgctgatgggcggctttggcctgaaacatcctccgcctcagatcctgatcaagaacacgcctgtacctgcggatcctccgaccaccttcaaccagtcaaagctgaactctttcatcacgcaatacagcaccggacaggtcagcgtggaaattgaatgggagctgcagaaggaaaacagcaagcgctggaaccccgagatccagtacacctccaactactacaaatctacaagtgtggactttgctgttaatacagaaggcgtgtactctgaaccccgccccattggcacccgttacctcacccgtaatctgtaa

SEQ ID NO: 3795 - DNA, 2217 bp, Artificial Sequence
  source: /note="Description of Artificial Sequence: Synthetic polynucleotide"
atggctgccgatggttatcttccagattggctcgaggacaacctctctgagggcattcgcgagtggtgggcgctgaaacctggagccccgaagcccaaagccaaccagcaaaagcaggacgacggccggggtctggtgcttcctggctacaagtacctcggacccttcaacggactcgacaagggggagcccgtcaacgcggcggacgcggcggccctcgagcacgacaaggcctacgaccagcagctgcaggcgggtgacaatccgtacctgcggtataaccacgccgacgccgagtttcaggagcgtctgcaagaagatacgtcttttgggggcaacctcgggcgagcagtcttccaggccaagaagcgggttctcgaacctctcggtctggttgaggaaggcgctaagacggctcctggaaagaagagaccggtagagccatcaccccagcgttctccagactcctctacgggcatcggcaagaagggccaacagcccgccagaaaaagactcaattttggtcagactggcgactcagagtcagttccagaccctcaacctctcggagaacctccagcagcgccctctggtgtgggacctaatacaatggctgcaggcggtggcgcaccaatggcagacaataacgaaggcgccgacggagtgggtagttcctcgggaaattggcattgcgattccacatggctgggcgacagagtcatcaccaccagcacccgaacctgggccctgcccacctacaacaaccacctctacaagcaaatctccaacgggacatcgggaggagccaccaacgacaacacctacttcggctacggcaccccctgggggtattttgactttaacagattccactgccacttttcaccacgtgactggcagcgactcatcaacaacaactggggattccggcccaagagactcagcttcaagctcttcaacatccaggtcaaggaggtcacgcagaatgaaggcaccaagaccatcgccaataacctcaccagcaccatccaggtgtttacggactcggagtaccagctgccgtacgttctcggctctgcccaccagggctgcctgcctccgttcccggcggacgtgttcacgattccccagtacggctacctaacactcaacaacggtagtcaggccgtgggacgctcctccttctactgcctggaatactttccttcgcagatgctgagaaccggcaacaacttccagtttacttacaccttcgaggacgtgcctttccacagcagctacgcccacagccagagcttggaccggctgatgaatcctctgattgaccagtacctgtactacttgtctcggattcaaacaacaggaggcacggcaaatacgcagactctgggcttcagccaaggtgggcctaatacaatggccaatcaggcaaagaactggctgccaggaccctgttaccgccaacaacgcgtctcaacgacaaccgggcaaaacaacaatagcaactttgcctggactgctgggaccaaataccatctgaatggaagaaattcattggctaatcctggcatcgctatggcaacacacaaagacgacgaggagcgtttttttcccagtaacgggatcctgatttttggcaaacaaaatgctgccagagacaatgcggattacagcgatgtcatgcccaccagcgaggaagaaatcaaaaccactaaccctgtggccacagaggaatacggtatcgtggcagataacttgcagcagcaaaacacggctcctcaaattggaactgtcaacagccagggggccttacccggtatggtctggcagaaccgggacgtgtacctgcagggtcccatctgggccaagattcctcacacggacggcaacttccacccgtctccgctgatgggcggctttggcctgaaacatcctccgcctcagatcctgatcaagaacacgcctgtacctgcggatcctccgaccaccttcaaccagtcaaagctgaactctttcatcacgcaatacagcaccggacaggtcagcgtggaaattgaatgggagctgcagaaggaaaacagcaagcgctggaaccccgagatccagtacacctccaactactacaaatctacaagtgtggactttgctgttaatacagaaggcgtgtactctgaaccccgccccattggcacccgttacctcacccgtaatctgtaa

SEQ ID NO: 3796 - DNA, 2217 bp, Artificial Sequence
  source: /note="Description of Artificial Sequence: Synthetic polynucleotide"
atggctgccgatggttatcttccagattggctcgaggacaacctctctgagggcattcgcgagtggtgggcgctgaaacctggagccccgaagcccaaagccaaccagcaaaagcaggacgacggccggggtctggtgcttcctggctacaagtacctcggacccttcaacggactcgacaagggggagcccgtcaacgcggcggacgcggcggccctcgagcacgacaaggcctacgaccagcagctgcaggcgggtgacaatccgtacctgcggtataaccacgccgacgccgagtttcaggagcgtctgcaagaagatacgtcttttgggggcaacctcgggcgagcagtcttccaggccaagaagcgggttctcgaacctctcggtctggttgaggaaggcgctaagacggctcctggaaagaagagaccggtagagccatcaccccagcgttctccagactcctctacgggcatcggcaagaagggccaacagcccgccagaaaaagactcaattttggtcagactggcgactcagagtcagttccagaccctcaacctctcggagaacctccagcagcgccctctggtgtgggacctaatacaatggctgcaggcggtggcgcaccaatggcagacaataacgaaggcgccgacggagtgggtagttcctcgggaaattggcattgcgattccacatggctgggcgacagagtcatcaccaccagcacccgaacctgggccctgcccacctacaacaaccacctctacaagcaaatctccaacgggacatcgggaggagccaccaacgacaacacctacttcggctacagcaccccctgggggtattttgactttaacagattccactgccacttttcaccacgtgactggcagcgactcatcaacaacaactggggattccggcccaagagactcagcttcaagctcttcaacatccaggtcaaggaggtcacgcagaatgaaggcaccaagaccatcgccaataacctcaccagcaccatccaggtgtttacggactcggagtaccagctgccgtacgttctcggctctgcccaccagggctgcctgcctccgttcccggcggacgtgttcacgattccccagtacggctacctaacactcaacaacggtagtcaggccgtgggacgctcctccttctactgcctggaatactttccttcgcagatgctgagaaccggcaacaacttccagtttacttacaccttcgaggacgtgcctttccacagcagctacgcccacagccagagcttggaccggccgatgaatcctctgattgaccagtacctgtactacttgtctcggattcaaacaacaggaggcacggcaaatacgcagactctgggcttcagccaaggtgggcctaatacaatggccaatcaggcaaagaactggctgccaggaccctgttaccgccaacaacgcgtctcaacgacaaccgggcaaaacaacaatagcaactttgcctggactgctgggaccaaataccatctgaatggaagaaattcattggctaatcctggcatcgctatggcaacacacaaagacgacgaggagcgtttttttcccagtaacgggatcctgatttttggcaaacaaaatgctgccagagacaatgcggattacagcgatgtcatgcccaccagcgaggaagaaatcaaaaccactaaccctgtggccacagaggaatacggtatcgtggcagataacttgcagcagcaaaacacggctcctcaaattggaactgtcaacagccagggggccttacccggtatggtctggcagaaccgggacgtgtacctgcagggtcccatctgggccaagattcctcacacggacggcaacttccacccgtctccgctgatgggcggctttggcctgaaacatcctccgcctcagatcctgatcaagaacacgcctgtacctgcggatcctccgaccaccttcaaccagtcaaagctgaactctttcatcacgcaatacagcaccggacaggtcagcgtggaaattgaatgggagctgcagaaggaaaacagcaagcgctggaaccccgagatccagtacacctccaactactacaaatctacaagtgtggactttgctgttaatacagaaggcgtgtactctgaaccccgccccattggcacccgttacctcacccgtaatctgtaa

SEQ ID NO: 3797 - DNA, 2217 bp, Artificial Sequence
  source: /note="Description of Artificial Sequence: Synthetic polynucleotide"
atggctgccgatggttatcttccagattggctcgaggacaacctctctgagggcattcgcgagtggtgggcgctgaaacctggagccccgaagcccaaagccaaccagcaaaagcaggacgacggccggggtctggtgcttcctggctacaagtacctcggacccttcaacggactcgacaagggggagcccgtcaacgcggcggacgcggcggccctcgagcacgacaaggcctacgaccagcagctgcaggcgggtgacaatccgtacctgcggtataaccacgccgacgccgagtttcaggagcgtctgcaagaagatacgtcttttgggggcaacctcgggcgagcagtcttccaggccaagaagcgggttctcgaacctctcggtctggttgaggaaggcgctaagacggctcctggaaagaagagaccggtagagccatcaccccagcgttctccagactcctctacgggcatcggcaagaagggccaacagcccgccagaaaaagactcaattttggtcagactggcgactcagagtcagttccagaccctcaacctctcggagaacctccagcagcgccctctggtgtgggacctaatacaatggctgcaggcggtggcgcaccaatggcagacaataacgaaggcgccgacggagtgggtagttcctcgggaaattggcattgcgattccacatggctgggcgacagagtcatcaccaccagcacccgaacctgggccctgcccacctacaacaaccacctctacaagcaaatctccaacgggacatcgggaggagccaccaacgacaacacctacttcggctacagcaccccctgggggtattttgactttaacagattccactgccacttttcaccacgtgactggcagcgactcatcaacaacaactggggattccggcccaagagactcagcctcaagctcttcaacatccaggtcaaggaggtcacgcagaatgaaggcaccaagaccatcgccaataacctcaccagcaccatccaggtgtttacggactcggagtaccagctgccgtacgttctcggctctgcccaccagggctgcctgcctccgttcccggcggacgtgttcacgattccccagtacggctacctaacactcaacaacggtagtcaggccgtgggacgctcctccttctactgcctggaatactttccttcgcagatgctgagaaccggcaacaacttccagtttacttacaccttcgaggacgtgcctttccacagcagctacgcccacagccagagcttggaccggctgatgaatcctctgattgaccagtacctgtactacttgtctcggattcaaacaacaggaggcacggcaaatacgcagactctgggcttcagccaaggtgggcctaatacaatggccaatcaggcaaagaactggctgccaggaccctgttaccgccaacaacgcgtctcaacgacaaccgggcaaaacaacaatagcaactttgcctggactgctgggaccaaataccatctgaatggaagaaattcattggctaatcctggcatcgctatggcaacacacaaagacgacgaggagcgtttttttcccagtaacgggatcctgatttttggcaaacaaaatgctgccagagacaatgcggattacagcgatgtcatgcccaccagcgaggaagaaatcaaaaccactaaccctgtggccacagaggaatacggtatcgtggcagataacttgcagcagcaaaacacggctcctcaaattggaactgtcaacagccagggggccttacccggtatggtctggcagaaccgggacgtgtacctgcagggtcccatctgggccaagattcctcacacggacggcaacttccacccgtctccgctgatgggcggctttggcctgaaacatcctccgcctcagatcctgatcaagaacacgcctgtacctgcggatcctccgaccaccttcaaccagtcaaagctgaactctttcatcacgcaatacagcaccggacaggtcagcgtggaaattgaatgggagctgcagaaggaaaacagcaagcgctggaaccccgagatccagtacacctccaactactacaaatctacaagtgtggactttgctgttaatacagaaggcgtgtactctgaaccccgccccattggcacccgttacctcacccgtaatctgtaa

SEQ ID NO: 3798 - DNA, 2217 bp, Artificial Sequence
  source: /note="Description of Artificial Sequence: Synthetic polynucleotide"
atggctgccgatggttatcttccagattggctcgaggacaacctctctgagggcattcgcgagtggtgggcgctgaaacctggagccccgaagcccaaagccaaccagcaaaagcaggacgacggccggggtctggtgcttcctggctacaagtacctcggacccttcaacggactcgacaagggggagcccgtcaacgcggcggacgcggcggccctcgagcacgacaaggcctacgaccagcagctgcaggcgggtgacaatccgtacctgcggtataaccacgccgacgccgagtttcaggagcgtctgcaagaagatacgtcttttgggggcaacctcgggcgagcagtcttccaggccaagaagcgggttctcgaacctctcggtctggttgaggaaggcgctaagacggctcctggaaagaagagaccggtagagccatcaccccagcgttctccagactcctctacgggcatcggcaagaagggccaacagcccgccagaaaaagactcaattttggtcagactggcgactcagagtcagttccagaccctcaacctctcggagaacctccagcagcgccctctggtgtgggacctaatacaatggctgcaggcggtggcgcaccaatggcagacaataacgaaggcgccgacggagtgggtagttcctcgggaaattggcattgcgattccacatggctgggcgacagagtcatcaccaccagcacccgaacctgggccctgcccacctacaacaaccacctctacaagcaaatctccaacgggacatcgggaggagccaccaacgacaacacctacttcggctacagcaccccctgggggtattttgactttaacagattccactgccacttttcaccacgtgactggcagcgactcatcaacaacaactggggattccggcccaagagactcagcttcaagctcttcaacatccaggtcaaggaggtcacgcagaatgaaggcaccaagaccatcgccaataacctcaccagcaccatccaggtgtttacggactcggagtaccagctgccgtacgttctcggctctgcccaccagggctgcctgcctccgttcccggcggacgtgttcacgattccccagtacggctacctaacactcaacaacggtagtcaggccgtgggacgctcctccttctactgcctggaatactttccttcgcagatgctgagaaccggcaacaacttccagtttacttacaccttcgaggacgtgcctttccacagcagctacgcccacagccagagcttggaccggctgatgaatcctctgattgaccagtacctgtactacttgtctcggattcaaacaacaggaggcacggcaaatacgcagactctgggcttcagccaaggtgggcctaatacaatggccaatcaggcaaagaactggctgccaggaccctgttaccgccaacaacgcgtctcaacgacaaccgggcaaaacaacaatagcaactttgcctggactgctgggaccaaataccatctgaatggaagaaattcattggctaatcctggcatcgctatggcaacacacaaagacgacgaggagcgtttttttcccagtaacgggatcctgatttttggcaaacaaaatgctgccagagacaatgcggattacagcgatgtcacgcccaccagcgaggaagaaatcaaaaccactaaccctgtggccacagaggaatacggtatcgtggcagataacttgcagcagcaaaacacggctcctcaaattggaactgtcaacagccagggggccttacccggtatggtctggcagaaccgggacgtgtacctgcagggtcccatctgggccaagattcctcacacggacggcaacttccacccgtctccgctgatgggcggctttggcctgaaacatcctccgcctcagatcctgatcaagaacacgcctgtacctgcggatcctccgaccaccttcaaccagtcaaagctgaactctttcatcacgcaatacagcaccggacaggtcagcgtggaaattgaatgggagctgcagaaggaaaacagcaagcgctggaaccccgagatccagtacacctccaactactacaaatctacaagtgtggactttgctgttaatacagaaggcgtgtactctgaaccccgccccattggcacccgttacctcacccgtaatctgtaa

SEQ ID NO: 3799 - DNA, 2217 bp, Artificial Sequence
  source: /note="Description of Artificial Sequence: Synthetic polynucleotide"
atggctgccgatggttatcttccagattggctcgaggacaacctctctgagggcattcgcgagtggtgggcgctgaaacctggagccccgaagcccaaagccaaccagcaaaagcaggacgacggccggggtctggtgcttcctggctacaagtacctcggacccttcaacggactcgacaagggggagcccgtcaacgcggcggacgcggcggccctcgagcacgacaaggcctacgaccagcagctgcaggcgggtgacaatccgtacctgcggtataaccacgccgacgccgagtttcaggagcgtctgcaagaagatacgtcttttgggggcaacctcgggcgagcagtcttccaggccaagaagcgggttctcgaacctctcggtctggttgaggaaggcgctaagacggctcctggaaagaagagaccggtagagccatcaccccagcgttctccagactcctctacgggcatcggcaagaagggccaacagcccgccagaaaaagactcaattttggtcagactggcgactcagagtcagttccagaccctcaacctctcggagaacctccagcagcgccctctggtgtgggacctaatacaatggctgcaggcggtggcgcaccaatggcagacaataacgaaggcgccgacggagtgggtagttcctcgggaaattggcattgcgattccacatggctgggcgacagagtcatcaccaccagcacccgaacctgggccctgcccacctacaacaaccacctctacaagcaaatctccaacgggacatcgggaggagccaccaacgacaacacctacttcggctacagcaccccctgggggtattttgactttaacagattccactgccacttttcaccacgtgactggcagcgactcatcaacaacaactggggattccggcccaagagactcagcttcaagctcttcaacatccaggtcaaggaggtcacgcagaatgaaggcaccaagaccatcgccaataacctcaccagcaccatccaggtgtttacggactcggagtaccagctgccgtacgttctcggctctgcccaccagggctgcctgcctccgttcccggcggacgtgttcacgattccccagtacggctacctaacactcaacaacggtagtcaggccgtgggacgctcctccttctactgcctggaatactttccttcgcagatgctgagaaccggcaacaacttccagtttacttacaccttcgaggacgtgcctttccacagcagctacgcccacagccagagcttggaccggctgatgaatcctctgattgaccagtacctgtactacttgtctcggattcaaacaacaggaggcacggcaaatacgcagactctgggcttcagccaaggtgggcctaatacaatggccaatcaggcaaagaactggctgccaggaccctgttaccgccaacaacgcgtctcaacgacaaccgggcaaaacaacaatagcaactttgcctggactgctgggaccaaataccatctgaatggaagaaattcattggctaatcctggcatcgctatggcaacacacaaagacgacgaggagcgtttttttcccagtaacgggatcctgatttttggcaaacaaaatgctgccagagacaatgcggattacagcgatgtcatgcccaccagcgaggaagaaatcaaaaccactaaccctgtggccacagaggaatacggtatcgtggcagataacttgcagcagcaaaacacggctcctcaaattggaactgtcaacagccagggggccttacccggtatggtccggcagaaccgggacgtgtacctgcagggtcccatctgggccaagattcctcacacggacggcaacttccacccgtctccgctgatgggcggctttggcctgaaacatcctccgcctcagatcctgatcaagaacacgcctgtacctgcggatcctccgaccaccttcaaccagtcaaagctgaactctttcatcacgcaatacagcaccggacaggtcagcgtggaaattgaatgggagctgcagaaggaaaacagcaagcgctggaaccccgagatccagtacacctccaactactacaaatctacaagtgtggactttgctgttaatacagaaggcgtgtactctgaaccccgccccattggcacccgttacctcacccgtaatctgtaa

SEQ ID NO: 3800 - DNA, 2217 bp, Artificial Sequence
  source: /note="Description of Artificial Sequence: Synthetic polynucleotide"
atggctgccgatggttatcttccagattggctcgaggacaacctctctgagggcattcgcgagtggtgggcgctgaaacctggagccccgaagcccaaagccaaccagcaaaagcaggacgacggccggggtctggtgcttcctggctacaagtacctcggacccttcaacggactcgacaagggggagcccgtcaacgcggcggacgcggcggccctcgagcacgacaaggcctacgaccagcagctgcaggcgggtgacaatccgtacctgcggtataaccacgccgacgccgagtttcaggagcgtctgcaagaagatacgtcttttgggggcaacctcgggcgagcagtcttccaggccaagaagcgggttctcgaacctctcggtctggttgaggaaggcgctaagacggctcctggaaagaagagaccggtagagccatcaccccagcgttctccagactcctctacggacatcggcaagaagggccaacagcccgccagaaaaagactcaattttggtcagactggcgactcagagtcagttccagaccctcaacctctcggagaacctccagcagcgccctctggtgtgggacctaatacaatggctgcaggcggtggcgcaccaatggcagacaataacgaaggcgccgacggagtgggtagttcctcgggaaattggcattgcgattccacatggctgggcgacagagtcatcaccaccagcacccgaacctgggccctgcccacctacaacaaccacctctacaagcaaatctccaacgggacatcgggaggagccaccaacgacaacacctacttcggctacagcaccccctgggggtattttgactttaacagattccactgccacttttcaccacgtgactggcagcgactcatcaacaacaactggggattccggcccaagagactcagcttcaagctcttcaacatccaggtcaaggaggtcacgcagaatgaaggcaccaagaccatcgccaataacctcaccagcaccatccaggtgtttacggactcggagtaccagctgccgtacgttctcggctctgcccaccagggctgcctgcctccgttcccggcggacgtgttcacgattccccagtacggctacctaacactcaacaacggtagtcaggccgtgggacgctcctccttctactgcctggaatactttccttcgcagatgctgagaaccggcaacaacttccagtttacttacaccttcgaggacgtgcctttccacagcagctacgcccacagccagagcttggaccggctgatgaatcctctgattgaccagtacctgtactacttgtctcggattcaaacaacaggaggcacggcaaatacgcagactctgggcttcagccaaggtgggcctaatacaatggccaatcaggcaaagaactggctgccaggaccctgttaccgccaacaacgcgtctcaacgacaaccgggcaaaacaacaatagcaactttgcctggactgctgggaccaaataccatctgaatggaagaaattcattggctaatcctggcatcgctatggcaacacacaaagacgacgaggagcgtttttttcccagtaacgggatcctgatttttggcaaacaaaatgctgccagagacaatgcggattacagcgatgtcatgcccaccagcgaggaagaaatcaaaaccactaaccctgtggccacagaggaatacggtatcgtggcagataacttgcagcagcaaaacacggctcctcaaattggaactgtcaacagccagggggccttacccggtatggtctggcagaaccgggacgtgtacctgcagggtcccatctgggccaagattcctcacacggacggcaacttccacccgtctccgctgatgggcggctttggcctgaaacatcctccgcctcagatcctgatcaagaacacgcctgtacctgcggatcctccgaccaccttcaaccagtcaaagctgaactctttcatcacgcaatacagcaccggacaggtcagcgtggaaattgaatgggagctgcagaaggaaaacagcaagcgctggaaccccgagatccagtacacctccaactactacaaatctacaagtgtggactttgctgttaatacagaaggcgtgtactctgaaccccgccccattggcacccgttacctcacccgtaatctgtaa

SEQ ID NO: 3801 - DNA, 2217 bp, Artificial Sequence
  source: /note="Description of Artificial Sequence: Synthetic polynucleotide"
atggctgccgatggttatcttccagattggctcgaggacaacctctctgagggcattcgcgagtggtgggcgctgaaacctggagccccgaagcccaaagccaaccagcaaaagcaggacgacggccggggtctggtgcttcctggctacaagtacctcggacccttcaacggactcgacaagggggagcccgtcaacgcggcggacgcggcggccctcgagcacgacaaggcctacgaccagcagctgcaggcgggtgacaatccgtacctgcggtataaccacgccgacgccgagtttcaggagcgtctgcaagaagatacgtcttttgggggcaacctcgggcgagcagtcttccaggccaagaagcgggttctcgaacctctcggtctggttgaggaaggcgctaagacggctcctggaaagaagagaccggtagagccatcaccccagcgttctccagactcctctacgggcatcggcaagaagggccaacagcccgccggaaaaagactcaattttggtcagactggcgactcagagtcagttccagaccctcaacctctcggagaacctccagcagcgccctctggtgtgggacctaatacaatggctgcaggcggtggcgcaccaatggcagacaataacgaaggcgccgacggagtgggtagttcctcgggaaattggcattgcgattccacatggctgggcgacagagtcatcaccaccagcacccgaacctgggccctgcccacctacaacaaccacctctacaagcaaatctccaacgggacatcgggaggagccaccaacgacaacacctacttcggctacagcaccccctgggggtattttgactttaacagattccactgccacttttcaccacgtgactggcagcgactcatcaacaacaactggggattccggcccaagagactcagcttcaagctcttcaacatccaggtcaaggaggtcacgcagaatgaaggcaccaagaccatcgccaataacctcaccagcaccatccaggtgtttacggactcggagtaccagctgccgtacgttctcggctctgcccaccagggctgcctgcctccgttcccggcggacgtgttcacgattccccagtacggctacctaacactcaacaacggtagtcaggccgtgggacgctcctccttctactgcctggaatactttccttcgcagatgctgagaaccggcaacaacttccagtttacttacaccttcgaggacgtgcctttccacagcagctacgcccacagccagagcttggaccggctgatgaatcctctgattgaccagtacctgtactacttgtctcggattcaaacaacaggaggcacggcaaatacgcagactctgggcttcagccaaggtgggcctaatacaatggccaatcaggcaaagaactggctgccaggaccctgttaccgccaacaacgcgtctcaacgacaaccgggcaaaacaacaatagcaactttgcctggactgctgggaccaaataccatctgaatggaagaaattcattggctaatcctggcatcgctatggcaacacacaaagacgacgaggagcgtttttttcccagtaacgggatcctgatttttggcaaacaaaatgctgccagagacaatgcggattacagcgatgtcatgcccaccagcgaggaagaaatcaaaaccactaaccctgtggccacagaggaatacggtatcgtggcagataacttgcagcagcaaaacacggctcctcaaattggaactgtcaacagccagggggccttacccggtatggtctggcagaaccgggacgtgtacctgcagggtcccatctgggccaagattcctcacacggacggcaacttccacccgtctccgctgatgggcggctttggcctgaaacatcctccgcctcagatcctgatcaagaacacgcctgtacctgcggatcctccgaccaccttcaaccagtcaaagctgaactctttcatcacgcaatacagcaccggacaggtcagcgtggaaattgaatgggagctgcagaaggaaaacagcaagcgctggaaccccgagatccagtacacctccaactactacaaatctacaagtgtggactttgctgttaatacagaaggcgtgtactctgaaccccgccccattggcacccgttacctcacccgtaatctgtaa

SEQ ID NO: 3802 - DNA, 2217 bp, Artificial Sequence
  source: /note="Description of Artificial Sequence: Synthetic polynucleotide"
atggctgccgatggttatcttccagattggctcgaggacaacctctctgagggcattcgcgagtggtgggcgctgaaacctggagccccgaagcccaaagccaaccagcaaaagcaggacgacggccggggtctggtgcttcctggctacaagtacctcggacccttcaacggactcgacaagggggagcccgtcaacgcggcggacgcggcggccctcgagcacgacaaggcctacgaccagcagctgcaggcgggtgacaatccgtacctgcggtataaccacgccgacgccgagtttcaggagcgtctgcaagaagatacgtcttttgggggcaacctcgggcgagcagtcttccaggccaagaagcgggttctcgaacctctcggtctggttgaggaaggcgctaagacggctcctggaaagaagagaccggtagagccatcaccccagcgttctccagactcctctacgggcatcggcaagaagggccaacagcccgccagaaaaagactcaattttggtcagactggcgactcagagtcagttccagaccctcaacctctcggagaacctccagcagcgccctctggtgtgggacctaatacaatggctgcaggcggtggcgcaccaatggcagacaataacgaaggcgccgacggagtgggtagttcctcgggaaattggcattgcgattccacatggctgggcgacagagtcatcaccaccagcacccgaacctgggccctgcccacctacaacaaccacctctacaagcaaatctccaacgggacatcgggaggagccaccaacgacaacacctacttcggctacagcaccccctgggggtattttgactttaacagattccactgccacttttcaccacgtgactggcagcgactcatcaacaacaactggggattccggcccaagagactcagcttcaagctcttcaacatccaggtcaaggaggtcacgcagaatgaaggcaccaagaccatcgccaataacctcaccagcaccatccaggtgtttacggactcggagtaccagctgccgtacgttctcggctctgcccaccagggctgcctgcctccgttcccggcggacgtgttcacgattccccagtacggctacctaacactcaacaacggtagtcaggccgtgggacgcccctccttctactgcctggaatactttccttcgcagatgctgagaaccggcaacaacttccagtttacttacaccttcgaggacgtgcctttccacagcagctacgcccacagccagagcttggaccggctgatgaatcctctgattgaccagtacctgtactacttgtctcggattcaaacaacaggaggcacggcaaatacgcagactctgggcttcagccaaggtgggcctaatacaatggccaatcaggcaaagaactggctgccaggaccctgttaccgccaacaacgcgtctcaacgacaaccgggcaaaacaacaatagcaactttgcctggactgctgggaccaaataccatctgaatggaagaaattcattggctaatcctggcatcgctatggcaacacacaaagacgacgaggagcgtttttttcccagtaacgggatcctgatttttggcaaacaaaatgctgccagagacaatgcggattacagcgatgtcatgcccaccagcgaggaagaaatcaaaaccactaaccctgtggccacagaggaatacggtatcgtggcagataacttgcagcagcaaaacacggctcctcaaattggaactgtcaacagccagggggccttacccggtatggtctggcagaaccgggacgtgtacctgcagggtcccatctgggccaagattcctcacacggacggcaacttccacccgtctccgctgatgggcggctttggcctgaaacatcctccgcctcagatcctgatcaagaacacgcctgtacctgcggatcctccgaccaccttcaaccagtcaaagctgaactctttcatcacgcaatacagcaccggacaggtcagcgtggaaattgaatgggagctgcagaaggaaaacagcaagcgctggaaccccgagatccagtacacctccaactactacaaatctacaagtgtggactttgctgttaatacagaaggcgtgtactctgaaccccgccccattggcacccgttacctcacccgtaatctgtaa

SEQ ID NO: 3803 - DNA, 2217 bp, Artificial Sequence
  source: /note="Description of Artificial Sequence: Synthetic polynucleotide"
atggctgccgatggttatcttccagattggctcgaggacaacctctctgagggcattcgcgagtggtgggcgctgaaacctggagccccgaagcccaaagccaaccagcaaaagcaggacgacggccggggtctggtgcttcctggctacaagtacctcggacccttcaacggactcgacaagggggagcccgtcaacgcggcggacgcggcggccctcgagcacgacaaggcctacgaccagcagctgcaggcgggtgacaatccgtacctgcggtataaccacgccgacgccgagtttcaggagcgtctgcaagaagatacgtcttttgggggcaacctcgggcgagcagtcttccaggccaagaagcgggttctcgaacctctcggtctggttgaggaaggcgctaagacggctcctggaaagaagagaccggtagagccatcaccccagcgttctccagactcctctacgggcatcggcaagaagggccaacagcccgccagaaaaagactcaattttggtcagactggcgactcagagtcagttccagaccctcaacctctcggagaacctccagcagcgccctctggtgtgggacctaatacaatggctgcaggcggtggcgcaccaatggcagacaataacgaaggcgccgacggagtgggtagttcctcgggaaattggcattgcgattccacatggctgggcgacagagtcatcaccaccagcacccgaacctgggccctgcccacctacaacaaccacctctacaagcaaatctccaacgggacatcgggaggagccaccaacgacaacacctacttcggctacagcaccccctgggggtattttgactttaacagattccactgccacttttcaccacgtgactggcagcgactcatcaacaacaactggggattccggcccaagagactcagcttcaagctcttcaacatccaggtcaaggcggtcacgcagaatgaaggcaccaagaccatcgccaataacctcaccagcaccatccaggtgtttacggactcggagtaccagctgccgtacgttctcggctctgcccaccagggctgcctgcctccgttcccggcggacgtgttcacgattccccagtacggctacctaacactcaacaacggtagtcaggccgtgggacgctcctccttctactgcctggaatactttccttcgcagatgctgagaaccggcaacaacttccagtttacttacaccttcgaggacgtgcctttccacagcagctacgcccacagccagagcttggaccggctgatgaatcctctgattgaccagtacctgtactacttgtctcggattcaaacaacaggaggcacggcaaatacgcagactctgggcttcagccaaggtgggcctaatacaatggccaatcaggcaaagaactggctgccaggaccctgttaccgccaacaacgcgtctcaacgacaaccgggcaaaacaacaatagcaactttgcctggactgctgggaccaaataccatctgaatggaagaaattcattggctaatcctggcatcgctatggcaacacacaaagacgacgaggagcgtttttttcccagtaacgggatcctgatttttggcaaacaaaatgctgccagagacaatgcggattacagcgatgtcatgcccaccagcgaggaagaaatcaaaaccactaaccctgtggccacagaggaatacggtatcgtggcagataacttgcagcagcaaaacacggctcctcaaattggaactgtcaacagccagggggccttacccggtatggtctggcagaaccgggacgtgtacctgcagggtcccatctgggccaagattcctcacacggacggcaacttccacccgtctccgctgatgggcggctttggcctgaaacatcctccgcctcagatcctgatcaagaacacgcctgtacctgcggatcctccgaccaccttcaaccagtcaaagctgaactctttcatcacgcaatacagcaccggacaggtcagcgtggaaattgaatgggagctgcagaaggaaaacagcaagcgctggaaccccgagatccagtacacctccaactactacaaatctacaagtgtggactttgctgttaatacagaaggcgtgtactctgaaccccgccccattggcacccgttacctcacccgtaatctgtaa

SEQ ID NO: 3804 - DNA, 2217 bp, Artificial Sequence
  source: /note="Description of Artificial Sequence: Synthetic polynucleotide"
atggctgccgatggttatcttccagattggctcgaggacaacctctctgagggcattcgcgagtggtgggcgctgaaacctggagccccgaagcccaaagccaaccagcaaaagcaggacgacggccggggtctggtgcttcctggctacaagtacctcggacccttcaacggactcgacaagggggagcccgtcaacgcggcggacgcggcggccctcgagcacgacaaggcctacgaccagcagctgcaggcgggtgacaatccgtacctgcggtataaccacgccgacgccgagtttcaggagcgtctgcaagaagatacgtcttttgggggcaacctcgggcgagcagtcttccaggccaagaagcgggttctcgaacctctcggtctggttgaggaaggcgctaagacggctcctggaaagaagagaccggtagagccatcaccccagcgttctccagactcctctacgggcatcggcaagaagggccaacagcccgccagaaaaagactcaattttggtcagactggcgactcagagtcagttccagaccctcaacctctcggagaacctccagcagcgccctctggtgtgggacctaatacaatggctgcaggcggtggcgcaccaatggcagacaataacgaaggcgccgacggagtgggtagttcctcgggaaattggcattgcgattccacatggctgggcgacagagtcatcaccaccagcacccgaacctgggccctgcccacctacaacaaccacctctacaagcaaatctccaacgggacatcgggaggagccaccaacgacaacacctacttcggctacagcaccccctgggggtattttgactttaacagattccactgccacttttcaccacgtgactggcagcgactcatcaacaacaactggggattccggcccaagagactcagcttcaagctcttcaacatccaggtcaaggaggtcacgcagaatgaaggcaccaagaccatcgccaataacctcaccagcaccatccaggtgtttacggactcggagtaccagctgccgtacgttctcggctctgcccaccagggctgcctgcctccgttcccggcggacgtgttcacgattccccagtacggctacctaacactcaacaacggtagtcaggccgtgggacgctcctccttctactgcctggaatactttccttcgcagatgctgagaaccggcaacaacttccagtttacttacaccttcgaggacgtgcctttccacagcagctacgcccacagccagagcttggaccggctgatgaatcctctgattgaccagtacctgtactacttgtctcggattcaaacaacaggaggcacggcaaatacgcagactctgggcttcagccaaggtgggcctaatacaatggccaatcaggcaaagaactggctgccaggaccctgttaccgccaacaacgcgtctcaacgacaaccgggcaaaacaacaatagcaactttgcctggactgctgggaccaaataccatctgaatggaagaaattcattggctaatcctggcatcgctatggcaacacacaaagacgacgaggagcgtttttttcccagtaacgggatcctgatttttggcaaacaaaatgctgccagagacaatgcggattacagcgatgtcatgcccaccagcgaggaagaaatcaaaaccactaaccctgtggccacagaggaatacggtatcgtggcagataacttgcagcagcaaaacacggctcctcaaattggaactgtcaacagccagggggccttacccggtatggtctggcagaaccgggacgtgtacctgcagggtcccatctgggccaagattcctcacacggacggcaacttccacccgtctccgctgatgggcggctttggcctgaaacatcctccgcctcagatcctgatcaagaacacgcctgtacctgcggatcctccgaccgccttcaaccagtcaaagctgaactctttcatcacgcaatacagcaccggacaggtcagcgtggaaattgaatgggagctgcagaaggaaaacagcaagcgctggaaccccgagatccagtacacctccaactactacaaatctacaagtgtggactttgctgttaatacagaaggcgtgtactctgaaccccgccccattggcacccgttacctcacccgtaatctgtaa

SEQ ID NO: 3805 - DNA, 2217 bp, Artificial Sequence
  source: /note="Description of Artificial Sequence: Synthetic polynucleotide"
atggctgccgatggttatcttccagattggctcgaggacaacctctctgagggcattcgcgagtggtgggcgctgaaacctggagccccgaagcccaaagccaaccagcaaaagcaggacgacggccggggtctggtgcttcctggctacaagtacctcggacccttcaacggactcgacaagggggagcccgtcaacgcggcggacgcggcggccctcgagcacgacaaggcctacgaccagcagctgcaggcgggtgacaatccgtacctgcggtataaccacgccgacgccgagtttcaggagcgtctgcaagaagatacgtcttttgggggcaacctcgggcgagcagtcttccaggccaagaagcgggttctcgaacctctcggtctggttgaggaaggcgctaagacggctcctggaaagaagagaccggtagagccatcaccccagcgttctccagactcctctacgggcatcggcaagaagggccaacagcccgccagaaaaagactcaattttggtcagactggcgactcagagtcagttccagaccctcaacctctcggagaacctccagcagcgccctctggtgtgggacctaatacaatggctgcaggcggtggcgcaccaatggcagacaataacgaaggcgccgacggagtgggtagttcctcgggaaattggcattgcgattccacatggctgggcgacagagtcatcaccaccagcacccgaacctgggccctgcccacctacaacaaccacctctacaagcaaatctccaacgggacatcgggaggagccaccaacgacaacacctacttcggctacagcaccccctgggggtattttgactttaacagattccgctgccacttttcaccacgtgactggcagcgactcatcaacaacaactggggattccggcccaagagactcagcttcaagctcttcaacatccaggtcaaggaggtcacgcagaatgaaggcaccaagaccatcgccaataacctcaccagcaccatccaggtgtttacggactcggagtaccagctgccgtacgttctcggctctgcccaccagggctgcctgcctccgttcccggcggacgtgttcacgattccccagtacggctacctaacactcaacaacggtagtcaggccgtgggacgctcctccttctactgcctggaatactttccttcgcagatgctgagaaccggcaacaacttccagtttacttacaccttcgaggacgtgcctttccacagcagctacgcccacagccagagcttggaccggctgatgaatcctctgattgaccagtacctgtactacttgtctcggattcaaacaacaggaggcacggcaaatacgcagactctgggcttcagccaaggtgggcctaatacaatggccaatcaggcaaagaactggctgccaggaccctgttaccgccaacaacgcgtctcaacgacaaccgggcaaaacaacaatagcaactttgcctggactgctgggaccaaataccatctgaatggaagaaattcattggctaatcctggcatcgctatggcaacacacaaagacgacgaggagcgtttttttcccagtaacgggatcctgatttttggcaaacaaaatgctgccagagacaatgcggattacagcgatgtcatgcccaccagcgaggaagaaatcaaaaccactaaccctgtggccacagaggaatacggtatcgtggcagataacttgcagcagcaaaacacggctcctcaaattggaactgtcaacagccagggggccttacccggtatggtctggcagaaccgggacgtgtacctgcagggtcccatctgggccaagattcctcacacggacggcaacttccacccgtctccgctgatgggcggctttggcctgaaacatcctccgcctcagatcctgatcaagaacacgcctgtacctgcggatcctccgaccaccttcaaccagtcaaagctgaactctttcatcacgcaatacagcaccggacaggtcagcgtggaaattgaatgggagctgcagaaggaaaacagcaagcgctggaaccccgagatccagtacacctccaactactacaaatctacaagtgtggactttgctgttaatacagaaggcgtgtactctgaaccccgccccattggcacccgttacctcacccgtaatctgtaa

SEQ ID NO: 3806 - DNA, 2217 bp, Artificial Sequence
  source: /note="Description of Artificial Sequence: Synthetic polynucleotide"
atggctgccgatggttatcttccagattggctcgaggacaacctctctgagggcattcgcgagtggtgggcgctgaaacctggagccccgaagcccaaagccaaccagcaaaagcaggacgacggccggggtctggtgcttcctggctacaagtacctcggacccttcaacggactcgacaagggggagcccgtcaacgcggcggacgcggcggccctcgagcacgacaaggcctacgaccagcagctgcaggcgggtgacaatccgtacctgcggtataaccacgccgacgccgagtttcaggagcgtctgcaagaagatacgtcttttgggggcaacctcgggcgagcagtcttccaggccaagaagcgggttctcgaacctctcggtctggttgaggaaggcgctaagacggctcctggaaagaagagaccggtagagccatcaccccagcgttctccagactcctctacgggcatcggcaagaagggccaacagcccgccagaaaaagactcaattttggtcagactggcgactcagagtcagttccagaccctcaacctctcggagaacctccagcagcgccctctggtgtgggacctaatacaatggctgcaggcggtggcgcaccaatggcagacaataacgaaggcgccgacggagtgggtagttcctcgggaaattggcattgcgattccacatggctgggcgacagagtcatcaccaccagcacccgaacctgggccctgcccacctacaacaaccacctctacaagcaaatctccaacgggacatcgggaggagccaccaacgacaacacctacttcggctacagcaccccctgggggtattttgactttaacagattccactgccacttttcaccacgtgactggcagcgactcatcaacaacaactggggattccggcccaagagactcagcttcaagctcttcaacatccaggtcaaggaggtcacgcagaatgaaggcaccaagaccatcgccaataacctcaccagcaccatccaggtgtttacggactcggagtaccagctgccgtacgttctcggctctgcccaccagggctgcctgcctccgttcccggcggacgtgttcacgattccccagtacggctacctaacactcaacaacggtagtcaggccgtgggacgctcctccttctactgcctggaatactttccttcgcagatgctgagaaccggcaacaacttccagtttacttacaccctcgaggacgtgcctttccacagcagctacgcccacagccagagcttggaccggctgatgaatcctctgattgaccagtacctgtactacttgtctcggattcaaacaacaggaggcacggcaaatacgcagactctgggcttcagccaaggtgggcctaatacaatggccaatcaggcaaagaactggctgccaggaccctgttaccgccaacaacgcgtctcaacgacaaccgggcaaaacaacaatagcaactttgcctggactgctgggaccaaataccatctgaatggaagaaattcattggctaatcctggcatcgctatggcaacacacaaagacgacgaggagcgtttttttcccagtaacgggatcctgatttttggcaaacaaaatgctgccagagacaatgcggattacagcgatgtcatgcccaccagcgaggaagaaatcaaaaccactaaccctgtggccacagaggaatacggtatcgtggcagataacttgcagcagcaaaacacggctcctcaaattggaactgtcaacagccagggggccttacccggtatggtctggcagaaccgggacgtgtacctgcagggtcccatctgggccaagattcctcacacggacggcaacttccacccgtctccgctgatgggcggctttggcctgaaacatcctccgcctcagatcctgatcaagaacacgcctgtacctgcggatcctccgaccaccttcaaccagtcaaagctgaactctttcatcacgcaatacagcaccggacaggtcagcgtggaaattgaatgggagctgcagaaggaaaacagcaagcgctggaaccccgagatccagtacacctccaactactacaaatctacaagtgtggactttgctgttaatacagaaggcgtgtactctgaaccccgccccattggcacccgttacctcacccgtaatctgtaa

SEQ ID NO: 3807 - DNA, 2217 bp, Artificial Sequence
  source: /note="Description of Artificial Sequence: Synthetic polynucleotide"
atggctgccgatggttatcttccagattggctcgaggacaacctctctgagggcattcgcgagtggtgggcgctgaaacctggagccccgaagcccaaagccaaccagcaaaagcaggacgacggccggggtctggtgcttcctggctacaagtacctcggacccttcaacggactcgacaagggggagcccgtcaacgcggcggacgcggcggccctcgagcacgacaaggcctacgaccagcagctgcaggcgggtgacaatccgtacctgcggtataaccacgccgacgccgagtttcaggagcgtctgcaagaagatacgtcttttgggggcaacctcgggcgagcagtcttccaggccaagaagcgggttctcgaacctctcggtctggttgaggaaggcgctaagacggctcctggaaagaagagaccggtagagccatcaccccagcgttctccagactcctctacgggcatcggcaagaagggccaacagcccgccagaaaaagactcaattttggtcagactggcgactcagagtcagttccagaccctcaacctctcggagaacctccagcagcgccctctggtgtgggacctaatacaatggctgcaggcggtggcgcaccaatggcagacaataacgaaggcgccgacggagtgggtagttcctcgggaaattggcattgcgattccacatggctgggcgacagagtcatcaccaccagcacccgaacctgggccctgcccacctacaacaaccacctctacaagcaaatctccaacgggacatcgggaggagccaccaacgacaacacctacttcggctacagcaccccctgggggtattttgactttaacagattccactgccacttttcaccacgtgactggcagcgactcatcaacaacaactggggattccggcccaagagactcagcttcaagctcttcaacatccaggtcaaggaggtcacgcagaatgaaggcaccaagaccatcgccaataacctcaccagcaccatccaggtgtttacggactcggagtaccagctgccgtacgttctcggctctgcccaccagggctgcctgcctccgttcccggcggacgtgttcacgattccccagtacggctacctaacactcaacaacggtagtcaggccgtgggacgctcctccttctactgcctggaatactttccttcgcagatgctgagaaccggcaacaacttccagtttacttacaccttcgaggacgtgcctttccacagcagctacgcccacagccagagcttggaccggctgatgaatcctctgattgaccagtacctgtactacttgtctcggattcaaacaacaggaggcacggcaaatacgcagactctgggcttcagccaaggtgggcctaatacaatggccaatcaggcaaagaactggctgccaggaccctgttaccgccaacaacgcgtctcaacgacaaccgggcaaaacaacaatagcaactttgcctggactgctgggaccaaataccatctgaatggaagaaattcattggctaatcctggcatcgctatggcaacacacaaagacgacgaggagcgtttttttcccagtaacgggatcctgatttttggcaaacaaaatgctgccagagacaatgcggattacagcgatgtcatgcccaccagcgaggaagaaatcaaaaccactaaccctgtggccacagaggaatacggtatcgtggcagataacttgcagcagcaaagcacggctcctcaaattggaactgtcaacagccagggggccttacccggtatggtctggcagaaccgggacgtgtacctgcagggtcccatctgggccaagattcctcacacggacggcaacttccacccgtctccgctgatgggcggctttggcctgaaacatcctccgcctcagatcctgatcaagaacacgcctgtacctgcggatcctccgaccaccttcaaccagtcaaagctgaactctttcatcacgcaatacagcaccggacaggtcagcgtggaaattgaatgggagctgcagaaggaaaacagcaagcgctggaaccccgagatccagtacacctccaactactacaaatctacaagtgtggactttgctgttaatacagaaggcgtgtactctgaaccccgccccattggcacccgttacctcacccgtaatctgtaa

SEQ ID NO: 3808 - DNA, 2217 bp, Artificial Sequence
  source: /note="Description of Artificial Sequence: Synthetic polynucleotide"
atggctgccgatggttatcttccagattggctcgaggacaacctctctgagggcattcgcgagtggtgggcgctgaaacctggagccccgaagcccaaagccaaccagcaaaagcaggacgacggccggggtctggtgcttcctggctacaagtacctcggacccttcaacggactcgacaagggggagcccgtcaacgcggcggacgcggcggccctcgagcacgacaaggcctacgaccagcagctgcaggcgggtgacaatccgtacctgcggtataaccacgccgacgccgagtttcaggagcgtctgcaagaagatacgtcttttgggggcaacctcgggcgagcagtcttccaggccaagaagcgggttctcgaacctctcggtctggttgaggaaggcgctaagacggctcctggaaagaagagacyggtagagccatcaccccagcgttctccagactcctctacgggcatcggcaagaagggccaacagcccgccagaaaaagactcaattttggtcagactggcgactcagagtcagttccagaccctcaacctctcggagaacctccagcagcgccctctggtgtgggacctaatacaatggctgcaggcggtggcgcaccaatggcagacaataacgaaggcgccgacggagtgggtagttcctcgggaaattggcattgcgattccacatggctgggcgacagagtcatcaccaccagcacccgaacctgggccctgcccacctacaacaaccacctctacaagcaaatctccaacgggacatcgggaggagccaccaacgacaacacctacttcggctacagcaccccctgggggtattttgactttaacagattccactgccacttttcaccacgtgactggcagcgactcatcaacaacaactggggattccggcccaagagactcagcttcaagctcttcaacatccaggtcaaggaggtcacgcagaatgaaggcaccaagaccatcgccaataacctcaccagcaccatccaggtgtttacggactcggagtaccagctgccgtacgttctcggctctgcccaccagggctgcctgcctccgttcccggcggacgtgttcacgattccccagtacggctacctaacactcaacaacggtagtcaggccgtgggacgctcctccttctactgcctggaatactttccttcgcagatgctgagaaccggcaacaacttccagtttacttacaccttcgaggacgtgcctttccacagcagctacgcccacagccagagcttggaccggctgatgaatcctctgattgaccagtacctgtactacttgtctcggattcaaacaacaggaggcacggcaaatacgcagactctgggcttcagccaaggtgggcctaatacaatggccaatcaggcaaagaactggctgccaggaccctgttaccgccaacaacgcgtctcaacgacaaccgggcaaaacaacaatagcaactttgcctggactgctgggaccaaataccatctgaatggaagaaattcattggctaatcctggcatcgctatggcaacacacaaagacgacgaggagcgtttttttcccagtaacgggatcctgatttttggcaaacaaaatgctgccagagacaatgcggattacagcgatgtcatgcccaccagcgaggaagaaatcaaaaccactaaccctgtggccacagaggaatacggtatcgtggcagataacttgcagcagcaaaacacggctcctcaaattggaactgtcagcagccagggggccttacccggtatggtctggcagaaccgggacgtgtacctgcagggtcccatctgggccaagattcctcacacggacggcaacttccacccgtctccgctgatgggcggctttggcctgaaacatcctccgcctcagatcctgatcaagaacacgcctgtacctgcggatcctccgaccaccttcaaccagtcaaagctgaactctttcatcacgcaatacagcaccggacaggtcagcgtggaaattgaatgggagctgcagaaggaaaacagcaagcgctggaaccccgagatccagtacacctccaactactacaaatctacaagtgtggactttgctgttaatacagaaggcgtgtactctgaaccccgccccattggcacccgttacctcacccgtaatctgtaa

SEQ ID NO: 3809 - DNA, 2217 bp, Artificial Sequence
  source: /note="Description of Artificial Sequence: Synthetic polynucleotide"
atggctgccgatggttatcttccagattggctcgaggacaacctctctgagggcattcgcgagtggtgggcgctgaaacctggagccccgaagcccaaagccaaccagcaaaagcaggacgacggccggggtctggtgcttcctggctacaagtacctcggacccttcaacggactcgacaagggggagcccgtcaacgcggcggacgcggcggccctcgagcacgacaaggcctacgaccagcagctgcaggcgggtgacaatccgtacctgcggtataaccacgccgacgccgagtttcaggagcgtctgcaagaagatacgtcttttgggggcaacctcgggcgagcagtcttccaggccaagaagcgggttctcgaacctctcggtctggttgaggaaggcgctaagacggctcctggaaagaagagaccggtagagccatcaccccagcgttctccagactcctctacgggcatcggcaagaagggccaacagcccgccagaaaaagactcaattttggtcagactggcgactcagagtcagttccagaccctcaacctctcggagaacctccagcagcgccctctggtgtgggacctaatacaatggctgcaggcggtggcgcaccaatggcagacaataacgaaggcgccgacggagtgggtagttcctcgggaaattggcattgcgattccacatggctgggcgacagagtcatcaccaccagcacccgaacctgggccctgcccacctacaacaaccacctctacaagcaaatctccaacgggacatcgggaggagccaccaacgacaacacctacttcggctacagcaccccctgggggtattttgactttaacagattccactgccacttttcaccacgtgactggcagcgactcatcaacaacaactggggattccggcccaagagactcagcttcaagctcttcaacatccaggtcaaggaggtcacgcagaatgaaggcaccaagaccatcgccaataacctcaccagcaccatccaggtgtttacggactcggagtaccagctgccgtacgttctcggctctgcccaccagggctgcctgcctccgttcccggcggacgtgttcacgattccccagtacggctacctaacactcaacaacggtagtcaggccgtgggacgctcctccttctactgcctggaatactttccttcgcagatgctgagaaccggcaacaacttccagtttacttacaccttcgaggacgtgcctttccacagcagctacgcccacagccagagcttggaccggctgatgaatcctctgattgaccagtacctgtactacttgtctcggattcaaacaacaggaggcacggcaaatacgcagactctgggcttcagccaaggtgggcctaatacaatggccaatcaggcaaagaactggctgccaggaccctgttaccgccaacaacgcgtctcaacgacaaccgggcaaaacaacaatagcaactttgcctggactgctgggaccaaataccatctgaatggaagaaattcattggctaatcctggcatcgctatggcaacacacaaagacgacgaggagcgtttttttcccagtaacgggatcctgatttttggcaaacaaagtgctgccagagacaatgcggattacagcgatgtcatgcccaccagcgaggaagaaatcaaaaccactaaccctgtggccacagaggaatacggtatcgtggcagataacttgcagcagcaaaacacggctcctcaaattggaactgtcaacagccagggggccttacccggtatggtctggcagaaccgggacgtgtacctgcagggtcccatctgggccaagattcctcacacggacggcaacttccacccgtctccgctgatgggcggctttggcctgaaacatcctccgcctcagatcctgatcaagaacacgcctgtacctgcggatcctccgaccaccttcaaccagtcaaagctgaactctttcatcacgcaatacagcaccggacaggtcagcgtggaaattgaatgggagctgcagaaggaaaacagcaagcgctggaaccccgagatccagtacacctccaactactacaaatctacaagtgtggactttgctgttaatacagaaggcgtgtactctgaaccccgccccattggcacccgttacctcacccgtaatctgtaa

SEQ ID NO: 3810 - DNA, 2217 bp, Artificial Sequence
  source: /note="Description of Artificial Sequence: Synthetic polynucleotide"
atggctgccgatggttatcttccagattggctcgaggacaacctctctgagggcattcgcgagtggtgggcgctgaaacctggagccccgaagcccaaagccaaccagcaaaagcaggacgacggccggggtctggtgcttcctggctacaagtacctcggacccttcaacggactcgacaagggggagcccgtcaacgcggcggacgcggcggccctcgagcacgacaaggcctacgaccagcagctgcaggcgggtgacaatccgtacctgcggtataaccacgccgacgccgagtttcaggagcgtctgcaagaagatacgtcttttgggggcaacctcgggcgagcagtcttccaggccaagaagcgggttctcgaacctctcggtctggttgaggaaggcgctaagacggctcctggaaagaagagaccggtagagccatcaccccagcgttctccagactcctctacgggcatcggcaagaagggccaacagcccgccagaaaaagactcaattttggtcagactggcgactcagagtcagttccagaccctcaacctctcggagaacctccagcagcgccctctggtgtgggacctaatacaatggctgcaggcggtggcgcaccaatggcagacaataacgaaggcgccgacggagtgggtagttcctcgggaaattggcattgcgattccacatggctgggcgacagagtcatcaccaccagcacccgaacctgggccctgcccacctacaacaaccacctctacaagcaaatctccaacgggacatcgggaggagccaccaacgacaacacctacttcggctacagcaccccctgggggtattttgactttaacagattccactgccacttttcaccacgtgactggcagcgactcatcaacaacaactggggattccggcccaagagactcagcttcaagctcttcaacatccaggtcaaggaggtcacgcagaatgaaggcaccaagaccatcgccaataacctcaccagcaccatccaggtgtttacggactcggagtaccagctgccgtacgttctcggctctgcccaccagggctgcctgcctccgttcccggcggacgtgttcacgattccccagtacggctacctaacactcaacaacggtagtcaggccgtgggacgctcctccttctactgcctggaatactttccttcgcagatgctgagaaccggcaacaacttccagtttacttacaccttcgaggacgtgcctttccacagcagctacgcccacagccagagcttggaccggctgatgaatcctctgattgaccagtacctgtactacttgtctcggattcaaacagcaggaggcacggcaaatacgcagactctgggcttcagccaaggtgggcctaatacaatggccaatcaggcaaagaactggctgccaggaccctgttaccgccaacaacgcgtctcaacgacaaccgggcaaaacaacaatagcaactttgcctggactgctgggaccaaataccatctgaatggaagaaattcattggctaatcctggcatcgctatggcaacacacaaagacgacgaggagcgtttttttcccagtaacgggatcctgatttttggcaaacaaaatgctgccagagacaatgcggattacagcgatgtcatgcccaccagcgaggaagaaatcaaaaccactaaccctgtggccacagaggaatacggtatcgtggcagataacttgcagcagcaaaacacggctcctcaaattggaactgtcaacagccagggggccttacccggtatggtctggcagaaccgggacgtgtacctgcagggtcccatctgggccaagattcctcacacggacggcaacttccacccgtctccgctgatgggcggctttggcctgaaacatcctccgcctcagatcctgatcaagaacacgcctgtacctgcggatcctccgaccaccttcaaccagtcaaagctgaactctttcatcacgcaatacagcaccggacaggtcagcgtggaaattgaatgggagctgcagaaggaaaacagcaagcgctggaaccccgagatccagtacacctccaactactacaaatctacaagtgtggactttgctgttaatacagaaggcgtgtactctgaaccccgccccattggcacccgttacctcacccgtaatctgtaa

SEQ ID NO: 3811 - DNA, 2217 bp, Artificial Sequence
  source: /note="Description of Artificial Sequence: Synthetic polynucleotide"
atggctgccgatggttatcttccagattggctcgaggacaacctctctgagggcattcgcgagtggtgggcgctgaaacctggagccccgaagcccaaagccaaccagcaaaagcaggacgacggccggggtctggtgcttcctggctacaagtacctcggacccttcaacggactcgacaagggggagcccgtcaacgcggcggacgcggcggccctcgagcacgacaaggcctacgaccagcagctgcaggcgggtgacaatccgtacctgcggtataaccacgccgacgccgagtttcaggagcgtctgcaagaagatacgtcttttgggggcaacctcgggcgagcagtcttccaggccaagaagcgggttctcgaacctctcggtctggttgaggaaggcgctaagacggctcctggaaagaagagaccggtagagccatcaccccagcgttctccagactcctctacgggcatcggcaagaagggccaacagcccgccagaaaaagactcaattttggtcagactggcgactcagagtcagttccagaccctcaacctctcggagaacctccagcagcgccctctggtgtgggacctaatacaatggctgcaggcggtggcgcaccaatggcagacaataacgaaggcgccgacggagtgggtagttcctcgggaaattggcattgcgattccacatggctgggcgacagagtcatcaccaccagcacccgaacctgggccctgcccacctacaacaaccacctctacaagcaaatctccaacgggacatcgggaggagccaccaacgacaacacctacttcggctacagcaccccctgggggtattttgactttaacagattccactgccacttttcaccacgtgactggcagcgactcatcaacaacaactggggattccggcccaagagactcagcttcaagctcttcaacatccaggtcaaggaggtcacgcagaatgaaggcaccaagaccatcgccaataacctcaccagcaccatccaggtgtttacggactcggagtaccagctgccgtacgttctcggctctgcccaccagggctgcctgcctccgttcccggcggacgtgttcacgattccccagtacggctacctaacactcaacaacggtagtcaggccgtgggacgctcctccttctactgcctggaatactttccttcgcagatgctgagaaccggcaacaacttccagtttacttacaccttcgaggacgtgcctttccacagcagctacgcccacagccagaacttggaccggctgatgaatcctctgattgaccagtacctgtactacttgtctcggattcaaacaacaggaggcacggcaaatacgcagactctgggcttcagccaaggtgggcctaatacaatggccaatcaggcaaagaactggctgccaggaccctgttaccgccaacaacgcgtctcaacgacaaccgggcaaaacaacaatagcaactttgcctggactgctgggaccaaataccatctgaatggaagaaattcattggctaatcctggcatcgctatggcaacacacaaagacgacgaggagcgtttttttcccagtaacgggatcctgatttttggcaaacaaaatgctgccagagacaatgcggattacagcgatgtcatgcccaccagcgaggaagaaatcaaaaccactaaccctgtggccacagaggaatacggtatcgtggcagataacttgcagcagcaaaacacggctcctcaaattggaactgtcaacagccagggggccttacccggtatggtctggcagaaccgggacgtgtacctgcagggtcccatctgggccaagattcctcacacggacggcaacttccacccgtctccgctgatgggcggctttggcctgaaacatcctccgcctcagatcctgatcaagaacacgcctgtacctgcggatcctccgaccaccttcaaccagtcaaagctgaactctttcatcacgcaatacagcaccggacaggtcagcgtggaaattgaatgggagctgcagaaggaaaacagcaagcgctggaaccccgagatccagtacacctccaactactacaaatctacaagtgtggactttgctgttaatacagaaggcgtgtactctgaaccccgccccattggcacccgttacctcacccgtaatctgtaa

SEQ ID NO: 3812 - DNA, 2217 bp, Artificial Sequence
  source: /note="Description of Artificial Sequence: Synthetic polynucleotide"
atggctgccgatggttatcttccagattggctcgaggacaacctctctgagggcattcgcgagtggtgggcgctgaaacctggagccccgaagcccaaagccaaccagcaaaagcaggacgacggccggggtctggtgcttcctggctacaagtacctcggacccttcaacggactcgacaagggggagcccgtcaacgcggcggacgcggcggccctcgagcacgacaaggcctacgaccagcagctgcaggcgggtgacaatccgtacctgcggtataaccacgccgacgccgagtttcaggagcgtctgcaagaagatacgtcttttgggggcaacctcgggcgagcagtcttccaggccaagaagcgggttctcgaacctctcggtctggttgaggaaggcgctaagacggctcctggaaagaagagaccggtagagccatcaccccagcgttctccagactcctctacgggcatcggcaagaagggccaacagcccgccagaaaaagactcaattttggtcagactggcgactcagagtcagttccagaccctcaacctctcggagaacctccagcagcgccctctggtgtgggacctaatacaatggctgcaggcggtggcgcaccaatggcagacaataacgaaggcgccgacggagtgggtagttcctcgggaaattggcattgcgattccacatggctgggcgacagagtcatcaccaccagcacccgaacctgggccctgcccacctacaacaaccacctctacaagcaaatctccaacgggacatcgggaggagccaccaacgacaacacctacttcggctacagcaccccctgggggtattttgactttaacagattccactgccacttttcaccacgtgactggcagcgactcatcaacaacaactggggattccggcccaagagactcagcttcaagctcttcaacatccaggtcaaggcggtcacgcagaatgaaggcaccaagaccatcgccaataacctcaccagcaccatccaggtgtttacggactcggagtaccagctgccgtacgttctcggctctgcccaccagggctgcctgcctccgttcccggcggacgtgttcacgattccccagtacggctacctaacactcaacaacggtagtcaggccgtgggacgctcctccttctactgcctggaatactttccttcgcagatgctgagaaccggcaacaacttccagtttacttacaccttcgaggacgtgcctttccacagcagctacgcccacagccagagcttggaccggctgatgaatcctctgattgaccagtacctgtactacttgtctcggattcaaacaacaggaggcacggcaaatacgcagactctgggcttcagccaaggtgggcctaatacaatggccaatcaggcaaagaactggctgccaggaccctgttaccgccaacaacgcgtctcaacgacaaccgggcaaaacaacaatagcaactttgcctggactgctgggaccaaataccatctgaatggaagaaattcattggctaatcctagcatcgctatggcaacacacaaagacgacgaggagcgtttttttcccagtaacgggatcctgatttttggcaaacaaaatgctgccagagacaatgcggattacagcgatgtcatgcccaccagcgaggaagaaatcaaaaccactaaccctgtggccacagaggaatacggtatcgtggcagataacttgcagcagcaaaacacggctcctcaaattggaactgtcaacagccagggggccttacccggtatggtctggcagaaccgggacgtgtacctgcagggtcccatctgggccaagattcctcacacggacggcaacttccacccgtctccgctgatgggcggctttggcctgaaacatcctccgcctcagatcctgatcaagaacacgcctgtacctgcggatcctccgaccaccttcaaccagtcaaagctgaactctttcatcacgcaatacagcaccggacaggtcagcgtggaaattgaatgggagctgcagaaggaaaacagcaagcgctggaaccccgagatccagtacacctccaactactacaaatctacaagtgtggactttgctgttaatacagaaggcgtgtactctgaaccccgccccattggcacccgttacctcacccgtaatctgtaa

SEQ ID NO: 3813 - DNA, 2217 bp, Artificial Sequence
  source: /note="Description of Artificial Sequence: Synthetic polynucleotide"
atggctgccgatggttatcttccagattggctcgaggacaacctctctgagggcattcgcgagtggtgggcgctgaaacctggagccccgaagcccaaagccaaccagcaaaagcaggacgacggccggggtctggtgcttcctggctacaagtacctcggacccttcaacggactcgacaagggggagcccgtcaacgcggcggacgcggcggccctcgagcacgacaaggcctacgaccagcagctgcaggcgggtgacaatccgtacctgcggtataaccacgccgacgccgagtttcaggagcgtctgcaagaagatacgtcttttgggggcaacctcgggcgagcagtcttccaggccaagaagcgggttctcgaacctctcggtctggttgaggaaggcgctaagacggctcctggaaagaagagaccggtagagccatcaccccagcgttctccagactcctctacgggcatcggcaagaagggccaacagcccgccagaaaaagactcaattttggtcagactggcgactcagagtcagttccagaccctcaacctctcggagaacctccagcagcgccctctggtgtgggacctaatacaatggctgcaggcggtggcgcaccaatggcagacaataacgaaggcgccgacggagtgggtagttcctcgggaaattggcattgcgattccacatggctgggcgacagagtcatcaccaccagcacccgaacctgggccctgcccacctacaacaaccacctctacaagcaaatctccaacgggacatcgggaggagccaccaacgacaacacctacttcggctacagcaccccctgggggtattttgactttaacagattccactgccacttttcaccacgtgactggcagcgactcatcaacaacaactggggattccggcccaagagactcagcttcaagctcttcaacatccaggtcaaggaggtcacgcagaatgaaggcaccaagaccatcgccaataacctcaccagcaccatccaggtgtttacggactcggagtaccagctgccgtacgttctcggctctgcccaccagggctgcctgcctccgttcccggcggacgtgttcacgattccccagtacggctacctaacactcaacaacggtagtcaggccgtgggacgctcctccttctactgcctggaatactttccttcgcagatgctgagaaccggcaacaacttccagtttacttacaccttcgaggacgtgcctttccacagcagctacgcccacagccagagcttggaccggctgatgaatcctctgattgaccagtacctgtactacttgtctcggattcaaacaacaggaggcacggcaaatacgcagactctgggcttcagccaaggtgggcctaatacaatggccaatcaggcaaagaactggctgccaggaccctgttaccgccaacaacgcgtctcaacgacaaccgggcaaaacaacaatagcaactttgcctggactgctgggaccaaataccatctgaatggaagaaattcattggctaatcctggcatcgctatggcaacacacaaagacgacgaggagcgtttttttcccagtaacgggatcctgatttttggcaaacaaaatgctgccagagacaatgcggattacagcgatgtcatgcccaccagcgaggaagaaatcaaaaccactaaccctgtggccacagaggaatacgatatcgtggcagataacttgcagcagcaaaacacggctcctcaaattggaactgtcaacagccagggggccttacccggtatggtctggcagaaccgggacgtgtacctgcagggtcccatctgggccaagattcctcacacggacggcaacttccacccgtctccgctgatgggcggctttggcctgaaacatcctccgcctcagatcctgatcaagaacacgcctgtacctgcggatcctccgaccaccttcaaccagtcaaagctgaactctttcatcacgcaatacagcaccggacaggtcagcgtggaaattgaatgggagctgcagaaggaaaacagcaagcgctggaaccccgagatccagtacacctccaactactacaaatctacaagtgtggactttgctgttaatacagaaggcgtgtactctgaaccccgccccattggcacccgttacctcacccgtaatctgtaa

SEQ ID NO: 3814 - DNA, 2217 bp, Artificial Sequence
  source: /note="Description of Artificial Sequence: Synthetic polynucleotide"
atggctgccgatggttatcttccagattggctcgaggacaacctctctgagggcattcgcgagtggtgggcgctgaaacctggagccccgaagcccaaagccaaccagcaaaagcaggacgacggccggggtctggtgcttcctggctacaagtacctcggacccttcaacggactcgacaagggggagcccgtcaacgcggcggacgcggcggccctcgagcacgacaaggcctacgaccagcagctgcaggcgggtgacaatccgtacctgcggtataaccacgccgacgccgagtttcaggagcgtctgcaagaagatacgtcttttgggggcaacctcgggcgagcagtcttccaggccaagaagcgggttctcgaacctctcggtctggttgaggaaggcgctaagacggctcctggaaagaagagaccggtagagccatcaccccagcgttctccagactcctctacgggcatcggcaagaagggccaacagcccgccagaaaaagactcaattttggtcagactggcgactcagagtcagttccagaccctcaacctctcggagaacctccagcagcgccctctggtgtgggacctaatacaatggctgcaggcggtggcgcaccaatggcagacaataacgaaggcgccgacggagtgggtagttcctcgggaaattggcattgcgattccacatggctgggcgacagagtcatcaccaccagcacccgaacctgggccctgcccacctacaacaaccacctctacaagcaaatctccaacgggacatcgggaggagccaccaacgacaacacctacttcggctacagcaccccctgggggtattttgactttaacagattccactgccacttttcaccacgtgactggcagcgactcatcaacaacaactggggattccggcccaagagactcagcttcaagctcttcaacatccaggtcaaggaggtcacgcagaatgaaggcaccaagaccatcgccaataacctcaccagcaccatccaggtgtttacggactcggagtaccagctgccgtacgttctcggctctgcccaccagggctgcctgcctccgttcccggcggacgtgttcacgattccccagtacggctacctaacactcaacaacggtagtcaggccgtgggacgctcctccttctactgcctggaatactttccttcgcagatgctgagaaccggcaacaacttccagtttacttacaccttcgaggacgtgcctttccacagcagctacgcccacagccagagcttggaccggctgatgaatcctctgattgaccagtacctgtactacttgtctcggattcaaacaacaggaggcacggcaaatacgcagactccgggcttcagccaaggtgggcctaatacaatggccaatcaggcaaagaactggctgccaggaccctgttaccgccaacaacgcgtctcaacgacaaccgggcaaaacaacaatagcaactttgcctggactgctgggaccaaataccatctgaatggaagaaattcattggctaatcctggcatcgctatggcaacacacaaagacgacgaggagcgtttttttcccagtaacgggatcctgatttttggcaaacaaaatgctgccagagacaatgcggattacagcgatgtcatgcccaccagcgaggaagaaatcaaaaccactaaccctgtggccacagaggaatacggtatcgtggcagataacttgcagcagcaaaacacggctcctcaaattggaactgtcaacagccagggggccttacccggtatggtctggcagaaccgggacgtgtacctgcagggtcccatctgggccaagattcctcacacggacggcaacttccacccgtctccgctgatgggcggctttggcctgaaacatcctccgcctcagatcctgatcaagaacacgcctgtacctgcggatcctccgaccaccttcaaccagtcaaagctgaactctttcatcacgcaatacagcaccggacaggtcagcgtggaaattgaatgggagctgcagaaggaaaacagcaagcgctggaaccccgagatccagtacacctccaactactacaaatctacaagtgtggactttgctgttaatacagaaggcgtgtactctgaaccccgccccattggcacccgttacctcacccgtaatctgtaa

SEQ ID NO: 3815 - DNA, 2217 bp, Artificial Sequence
  source: /note="Description of Artificial Sequence: Synthetic polynucleotide"
atggctgccgatggttatcttccagattggctcgaggacaacctctctgagggcattcgcgagtggtgggcgctgaaacctggagccccgaagcccaaagccaaccagcaaaagcaggacgacggccggggtctggtgcttcctggctacaagtacctcggacccttcaacggactcgacaagggggagcccgtcaacgcggcggacgcggcggccctcgagcacgacaaggcctacgaccagcagctgcaggcgggtgacaatccgtacctgcggtataaccacgccgacgccgagtttcaggagcgtctgcaagaagatacgtcttttgggggcaacctcgggcgagcagtcttccaggccaagaagcgggttctcgaacctctcggtctggttgaggaaggcgctaagacggctcctggaaagaagagaccggtagagccatcaccccagcgttctccagactcctctacgggcatcggcaagaagggccaacagcccgccagaaaaagactcaattttggtcagactggcgactcagagtcagttccagaccctcaacctctcggagaacctccagcagcgccctctggtgtgggacctaatacaatggctgcaggcggtggcgcaccaatggcagacaataacgaaggcgccgacggagtgggtagttcctcgggaaattggcattgcgattccacatggctgggcgacagagtcatcaccaccagcacccgaacctgggccctgcccacctacaacaaccacctctacaagcaaatctccaacgggacatcgggaggagccaccaacgacaacacctacttcggctacagcaccccctgggggtattttgactttaacagattccactgccacttttcaccacgtgactggcagcgactcatcaacaacaactggggattccggcccaagagactcagcttcaagctcttcaacatccaggtcaaggaggtcacgcagaatgaaggcaccaagaccatcgccaataacctcaccagcaccatccaggtgtttacggactcggagtaccagctgccgtacgttctcggctctgcccaccagggctgcctgcctccgttcccggcggacgtgttcacgattccccagtacggctacctaacactcaacaacggtagtcaggccgtgggacgctcctcctcctactgcctggaatactttccttcgcagatgctgagaaccggcaacaacttccagtttacttacaccttcgaggacgtgcctttccacagcagctacgcccacagccagagcttggaccggctgatgaatcctctgattgaccagtacctgtactacttgtctcggattcaaacaacaggaggcacggcaaatacgcagactctgggcttcagccaaggtgggcctaatacaatggccaatcaggcaaagaactggctgccaggaccctgttaccgccaacaacgcgtctcaacgacaaccgggcaaaacaacaatagcaactttgcctggactgctgggaccaaataccatctgaatggaagaaattcattggctaatcctggcatcgctatggcaacacacaaagacgacgaggagcgtttttttcccagtaacgggatcctgatttttggcaaacaaaatgctgccagagacaatgcggattacagcgatgtcatgcccaccagcgaggaagaaatcaaaaccactaaccctgtggccacagaggaatacggtatcgtggcagataacttgcagcagcaaaacacggctcctcaaattggaactgtcaacagccagggggccttacccggtatggtctggcagaaccgggacgtgtacctgcagggtcccatctgggccaagattcctcacacggacggcaacttccacccgtctccgctgatgggcggctttggcctgaaacatcctccgcctcagatcctgatcaagaacacgcctgtacctgcggatcctccgaccaccttcaaccagtcaaagctgaactctttcatcacgcaatacagcaccggacaggtcagcgtggaaattgaatgggagctgcagaaggaaaacagcaagcgctggaaccccgagatccagtacacctccaactactacaaatctacaagtgtggactttgctgttaatacagaaggcgtgtactctgaaccccgccccattggcacccgttacctcacccgtaatctgtaa

SEQ ID NO: 3816 - DNA, 2217 bp, Artificial Sequence
  source: /note="Description of Artificial Sequence: Synthetic polynucleotide"
atggctgccgatggttatcttccagattggctcgaggacaacctctctgagggcattcgcgagtggtgggcgctgaaacctggagccccgaagcccaaagccaaccagcaaaagcaggacgacggccggggtctggtgcttcctggctacaagtacctcggacccttcaacggactcgacaagggggagcccgtcaacgcggcggacgcggcggccctcgagcacgacaaggcctacgaccagcagctgcaggcgggtgacaatccgtacctgcggtataaccacgccgacgccgagtttcaggagcgtctgcaagaagatacgtcttttgggggcaacctcgggcgagcagccttccaggccaagaagcgggttctcgaacctctcggtctggttgaggaaggcgctaagacggctcctggaaagaagagaccggtagagccatcaccccagcgttctccagactcctctacgggcatcggcaagaagggccaacagcccgccagaaaaagactcaattttggtcagactggcgactcagagtcagttccagaccctcaacctctcggagaacctccagcagcgccctctggtgtgggacctaatacaatggctgcaggcggtggcgcaccaatggcagacaataacgaaggcgccgacggagtgggtagttcctcgggaaattggcattgcgattccacatggctgggcgacagagtcatcaccaccagcacccgaacctgggccctgcccacctacaacaaccacctctacaagcaaatctccaacgggacatcgggaggagccaccaacgacaacacctacttcggctacagcaccccctgggggtattttgactttaacagattccactgccacttttcaccacgtgactggcagcgactcatcaacaacaactggggattccggcccaagagactcagcttcaagctcttcaacatccaggtcaaggaggtcacgcagaatgaaggcaccaagaccatcgccaataacctcaccagcaccatccaggtgtttacggactcggagtaccagctgccgtacgttctcggctctgcccaccagggctgcctgcctccgttcccggcggacgtgttcacgattccccagtacggctacctaacactcaacaacggtagtcaggccgtgggacgctcctccttctactgcctggaatactttccttcgcagatgctgagaaccggcaacaacttccagtttacttacaccttcgaggacgtgcctttccacagcagctacgcccacagccagagcttggaccggctgatgaatcctctgattgaccagtacctgtactacttgtctcggattcaaacaacaggaggcacggcaaatacgcagactctgggcttcagccaaggtgggcctaatacaatggccaatcaggcaaagaactggctgccaggaccctgttaccgccaacaacgcgtctcaacgacaaccgggcaaaacaacaatagcaactttgcctggactgctgggaccaaataccatctgaatggaagaaattcattggctaatcctggcatcgctatggcaacacacaaagacgacgaggagcgtttttttcccagtaacgggatcctgatttttggcaaacaaaatgctgccagagacaatgcggattacagcgatgtcatgcccaccagcgaggaagaaatcaaaaccactaaccctgtggccacagaggaatacggtatcgtggcagataacttgcagcagcaaaacacggctcctcaaattggaactgtcaacagccagggggccttacccggtatggtctggcagaaccgggacgtgtacctgcagggtcccatctgggccaagattcctcacacggacggcaacttccacccgtctccgctgatgggcggctttggcctgaaacatcctccgcctcagatcctgatcaagaacacgcctgtacctgcggatcctccgaccaccttcaaccagtcaaagctgaactctttcatcacgcaatacagcaccggacaggtcagcgtggaaattgaatgggagctgcagaaggaaaacagcaagcgctggaaccccgagatccagtacacctccaactactacaaatctacaagtgtggactttgctgttaatacagaaggcgtgtactctgaaccccgccccattggcacccgttacctcacccgtaatctgtaa

SEQ ID NO: 3817 - DNA, 2217 bp, Artificial Sequence
  source: /note="Description of Artificial Sequence: Synthetic polynucleotide"
atggctgccgatggttatcttccagattggctcgaggacaacctctctgagggcattcgcgagtggtgggcgctgaaacctggagccccgaagcccaaagccaaccagcaaaagcaggacgacggccggggtctggtgcttcctggctacaagtacctcggacccttcaacggactcgacaagggggagcccgtcaacgcggcggacgcggcggccctcgagcacgacaaggcctacgaccagcagctgcaggcgggtgacaatccgtacctgcggtataaccacgccgacgccgagtttcaggagcgtctgcaagaagatacgtcttttgggggcaacctcgggcgagcagtcttccaggccaagaagcgggttctcgaacctctcggtctggttgaggaaggcgctaagacggctcctggaaagaagagaccggtagagccatcaccccagcgttctccagactcctctacgggcatcggcaagaagggccaacagcccgccagaaaaagactcaattttggtcagactggcgactcagagtcagttccagaccctcaacctctcggagaacctccagcagcgccctctggtgtgggacctaatacaatggctgcaggcggtggcgcaccaatggcagacaataacgaaggcgccgacggagtgggtagttcctcgggaaattggcattgcgattccacatggctgggcgacagagtcatcaccaccagcacccgaacctgggccctgcccacctacaacaaccacctctacaagcaaatctccaacgggacatcgggaggagccaccgacgacaacacctacttcggctacagcaccccctgggggtattttgactttaacagattccactgccacttttcaccacgtgactggcagcgactcatcaacaacaactggggattccggcccaagagactcagcttcaagctcttcaacatccaggtcaaggaggtcacgcagaatgaaggcaccaagaccatcgccaataacctcaccagcaccatccaggtgtttacggactcggagtaccagctgccgtacgttctcggctctgcccaccagggctgcctgcctccgttcccggcggacgtgttcacgattccccagtacggctacctaacactcaacaacggtagtcaggccgtgggacgctcctccttctactgcctggaatactttccttcgcagatgctgagaaccggcaacaacttccagtttacttacaccttcgaggacgtgcctttccacagcagctacgcccacagccagagcttggaccggctgatgaatcctctgattgaccagtacctgtactacttgtctcggattcaaacaacaggaggcacggcaaatacgcagactctgggcttcagccaaggtgggcctaatacaatggccaatcaggcaaagaactggctgccaggaccctgttaccgccaacaacgcgtctcaacgacaaccgggcaaaacaacaatagcaactttgcctggactgctgggaccaaataccatctgaatggaagaaattcattggctaatcctggcatcgctatggcaacacacaaagacgacgaggagcgtttttttcccagtaacgggatcctgatttttggcaaacaaaatgctgccagagacaatgcggattacagcgatgtcatgcccaccagcgaggaagaaatcaaaaccactaaccctgtggccacagaggaatacggtatcgtggcagataacttgcagcagcaaaacacggctcctcaaattggaactgtcaacagccagggggccttacccggtatggtctggcagaaccgggacgtgtacctgcagggtcccatctgggccaagattcctcacacggacggcaacttccacccgtctccgctgatgggcggctttggcctgaaacatcctccgcctcagatcctgatcaagaacacgcctgtacctgcggatcctccgaccaccttcaaccagtcaaagctgaactctttcatcacgcaatacagcaccggacaggtcagcgtggaaattgaatgggagctgcagaaggaaaacagcaagcgctggaaccccgagatccagtacacctccaactactacaaatctacaagtgtggactttgctgttaatacagaaggcgtgtactctgaaccccgccccattggcacccgttacctcacccgtaatctgtaa

SEQ ID NO: 3818 - DNA, 2217 bp, Artificial Sequence
  source: /note="Description of Artificial Sequence: Synthetic polynucleotide"
atggctgccgatggttatcttccagattggctcgaggacaacctctctgagggcattcgcgagtggtgggcgctgaaacctggagccccgaagcccaaagccaaccagcaaaagcaggacgacggccggggtctggtgcttcctggctacaagtacctcggacccttcaacggactcgacaagggggagcccgtcaacgcggcggacgcggcggccctcgagcacgacaaggcctacgaccagcagctgcaggcgggtgacaatccgtacctgcggtataaccacgccgacgccgagtttcaggagcgtctgcaagaagatacgtcttttgggggcaacctcgggcgagcagtcttccaggccaagaagcgggttctcgaacctctcggtctggttgaggaaggcgctaagacggctcctggaaagaagagaccggtagagccatcaccccagcgttctccagactcctctacgggcatcggcaagaagggccaacagcccgccagaaaaagactcaattttggtcagactggcgactcagagtcagttccagaccctcaacctctcggagaacctccagcagcgccctctggtgtgggacctaatacaatggctgcaggcggtggcgcaccaatggcagacaataacgaaggcgccgacggagtgggtagttcctcgggaaattggcattgcgattccacatggctgggcgacagagtcatcaccaccagcacccgaacctgggccctgcccacctacaacaaccacctctacaagcaaatctccaacgggacatcgggaggagccaccaacgacaacacctacttcggctacagcaccccctgggggtattttgactttaacagattccactgccacttttcaccacgtgactggcagcgactcatcaacaacaactggggattccggcccaagagactcagcttcaagctcttcaacatccaggtcaaggaggtcacgcagaatgaaggcaccaagaccatcgccaataacctcaccagcaccatccaggtgtttacggactcggagtaccagctgccgtacgttctcggctctgcccaccagggctgcctgcctccgttcccggcggacgtgttcacgattccccagtacggctacctaacactcaacaacggtagtcaggccgtgggacgctcctccttctactgcctggaatactttccttcgcagatgctgagaaccggcaacaacttccagtttacttacaccttcgaggacgtgcctttccacagcagctacgcccacagccagagcttggaccggctgatgaatcctctgattgaccagtacctgtactacttgtctcggattcaaacaacaggaggcacggcaaatacgcagactctgggcttcagccaaggtgggcctaatacaatggccaatcaggcaaagaactggctgccaggaccctgttaccgccaacaacgcgtctcaacgacaaccgggcaaaacaacaatagcaactttgcctggactgctgggaccaaataccatctgaatggaagaaattcattggctaatcctggcatcgctatggcaacacacaaagacgacgaggagcgtttttttcccagtaacgggatcctgatttttggcaaacaaaatgctaccagagacaatgcggattacagcgatgtcatgcccaccagcgaggaagaaatcaaaaccactaaccctgtggccacagaggaatacggtatcgtggcagataacttgcagcagcaaaacacggctcctcaaattggaactgtcaacagccagggggccttacccggtatggtctggcagaaccgggacgtgtacctgcagggtcccatctgggccaagattcctcacacggacggcaacttccacccgtctccgctgatgggcggctttggcctgaaacatcctccgcctcagatcctgatcaagaacacgcctgtacctgcggatcctccgaccaccttcaaccagtcaaagctgaactctttcatcacgcaatacagcaccggacaggtcagcgtggaaattgaatgggagctgcagaaggaaaacagcaagcgctggaaccccgagatccagtacacctccaactactacaaatctacaagtgtggactttgctgttaatacagaaggcgtgtactctgaaccccgccccattggcacccgttacctcacccgtaatctgtaa

SEQ ID NO: 3819 - DNA, 2217 bp, Artificial Sequence
  source: /note="Description of Artificial Sequence: Synthetic polynucleotide"
atggctgccgatggttatcttccagattggctcgaggacaacctctctgagggcattcgcgagtggtgggcgctgaaacctggagccccgaagcccaaagccaaccagcaaaagcaggacgacggccggggtctggtgcttcctggctacaagtacctcggacccttcaacggactcgacaagggggagcccgtcaacgcggcggacgcggcggccctcgagcacgacaaggcctacgaccagcagctgcaggcgggtgacaatccgtacctgcggtataaccacgccgacgccgagtttcaggagcgtctgcaagaagatacgtcttttgggggcaacctcgggcgagcagtcttccaggccaagaagcgggttctcgaacctctcggtctggttgaggaaggcgctaagacggctcctggaaagaagagaccggtagagccatcaccccagcgttctccagactcctctacgggcatcggcaagaagggccaacagcccgccagaaaaagactcaattttggtcagactggcgactcagagtcagttccagaccctcaacctctcggagaacctccagcagcgccctctggtgtgggacctaatacaatggctgcaggcggtggcgcaccaatggcagacaataacgaaggcgccgacggagtgggtagttcctcgggaaattggcattgcgattccacatggctgggcgacagagtcatcaccaccagcacccgaacctgggccctgcccacctacaacaaccacctctacaagcaaatctccaacgggacatcgggaggagccaccaacgacaacacctacttcggctacagcaccccctgggggtattttgactttaacagattccactgccacttttcaccacgtgactggcagcgactcatcaacaacaactggggattccggcccaagagactcagcttcaagctcttcaacatccaggtcaaggaggtcacgcagaatgaaggcaccaagaccatcgccaataacctcaccagcaccatccaggtgtttacggactcggagtaccagctgccgtacgttctcggctctgcccaccagggctgcctgcctccgttcccggcggacgtgttcacgattccccagtacggctacctaacactcaacaacggtagtcaggccgtgggacgctcctccttctactgcctggaatactttccttcgcagatgctgagaaccggcaacaacttccagtttacttacaccttcgaggacgtgcctttccacagcagctacgcccacagccagagcttggaccggctgatgaatcctctgattgaccagtacctgtactacttgtctcggattcaaacaacaggaggcacggcaaatacgcagactctgggcttcagccaaggtgggcctaatacaatggccaatcaggcaaagaactggctgccaggaccctgttaccgccaacaacgcgtctcaacgacaaccgggcaaaacaacaatagcaactttgcctggactgctgggaccaaataccatctgaatggaagaaattcattggctaatcctggcatcgctatggcaacacacaaagacgacgaggagcgtttttttcccagtaacgggatcctgatttttggcaaacaaaatgctgccagagacaatgcggattacagcgatgtcatgcccaccagcgaggaagaaatcaaaaccactaaccctgtggccacagaggaacacggtatcgtggcagataacttgcagcagcaaaacacggctcctcaaattggaactgtcaacagccagggggccttacccggtatggtctggcagaaccgggacgtgtacctgcagggtcccatctgggccaagattcctcacacggacggcaacttccacccgtctccgctgatgggcggctttggcctgaaacatcctccgcctcagatcctgatcaagaacacgcctgtacctgcggatcctccgaccaccttcaaccagtcaaagctgaactctttcatcacgcaatacagcaccggacaggtcagcgtggaaattgaatgggagctgcagaaggaaaacagcaagcgctggaaccccgagatccagtacacctccaactactacaaatctacaagtgtggactttgctgttaatacagaaggcgtgtactctgaaccccgccccattggcacccgttacctcacccgtaatctgtaa

SEQ ID NO: 3820 - DNA, 2217 bp, Artificial Sequence
  source: /note="Description of Artificial Sequence: Synthetic polynucleotide"
atggctgccgatggttatcttccagattggctcgaggacaacctctctgagggcattcgcgagtggtgggcgctgaaacctggagccccgaagcccaaagccaaccagcaaaagcaggacgacggccggggtctggtgcttcctggctacaagtacctcggacccttcaacggactcgacaagggggagcccgtcaacgcggcggacgcggcggccctcgagcacgacaaggcctacgaccagcagctgcaggcgggtgacaatccgtacctgcggtataaccacgccgacgccgagtttcaggagcgtctgcaagaagatacgtcttttgggggcaacctcgggcgagcagtcttccaggccaagaagcgggttctcgaacctctcggtctggttgaggaaggcgctaagacggctcctggaaagaagagaccggtagagccatcaccccagcgttctccagactcctctacgggcatcggcaagaagggccaacagcccgccagaaaaagactcaattttggtcagactggcgactcagagtcagttccagaccctcaacctctcggagaacctccagcagcgccctctggtgtgggacctaatacaatggctgcaggcggtggcgcaccaatggcagacaataacgaaggcgccgacggagtgggtagttcctcgggaaattggcattgcgattccacatggctgggcgacagagtcatcaccaccagcacccgaacctgggccctgcccacctacaacaaccacctctacaagcaaatctccaacgggacatcgggaggagccaccaacgacaacacctacttcggctacagcaccccctgggggtattttgactttaacagattccactgccacttttcaccacgtgactggcagcgactcatcaacaacaactggggattccggcccaagagactcagcttcaagctcttcaacatccaggtcaaggaggtcacgcagaatgaaggcaccaagaccatcgccaataacctcaccagcaccatccaggtgtttacggactcggagtaccagctgccgtacgttctcggctctgcccaccagggctgcctgcctccgttcccggcggacgtgttcacgattccccagtacggctacctaacactcaacaacggtagtcaggccgtgggacgctcctccttctactgcctggaatactttccttcgcagatgctgagaaccggcaacaacttccagtttacttacaccttcgaggacgtgcctttccacagcagctacgcccgcagccagagcttggaccggctgatgaatcctctgattgaccagtacctgtactacttgtctcggattcaaacaacaggaggcacggcaaatacgcagactctgggcttcagccaaggtgggcctaatacaatggccaatcaggcaaagaactggctgccaggaccctgttaccgccaacaacgcgtctcaacgacaaccgggcaaaacaacaatagcaactttgcctggactgctgggaccaaataccatctgaatggaagaaattcattggctaatcctggcatcgctatggcaacacacaaagacgacgaggagcgtttttttcccagtaacgggatcctgatttttggcaaacaaaatgctgccagagacaatgcggattacagcgatgtcatgcccaccagcgaggaagaaatcaaaaccactaaccctgtggccacagaggaatacggtatcgtggcagataacttgcagcagcaaaacacggctcctcaaattggaactgtcaacagccagggggccttacccggtatggtctggcagaaccgggacgtgtacctgcagggtcccatctgggccaagattcctcacacggacggcaacttccacccgtctccgctgatgggcggctttggcctgaaacatcctccgcctcagatcctgatcaagaacacgcctgtacctgcggatcctccgaccaccttcaaccagtcaaagctgaactctttcatcacgcaatacagcaccggacaggtcagcgtggaaattgaatgggagctgcagaaggaaaacagcaagcgctggaaccccgagatccagtacacctccaactactacaaatctacaagtgtggactttgctgttaatacagaaggcgtgtactctgaaccccgccccattggcacccgttacctcacccgtaatctgtaa

SEQ ID NO: 3821 - DNA, 2217 bp, Artificial Sequence
  source: /note="Description of Artificial Sequence: Synthetic polynucleotide"
atggctgccgatggttatcttccagattggctcgaggacaacctctctgagggcattcgcgagtggtgggcgctgaaacctggagccccgaagcccaaagccaaccagcaaaagcaggacgacggccggggtctggtgcttcctggctacaagtacctcggacccttcaacggactcgacaagggggagcccgtcaacgcggcggacgcggcggccctcgagcacgacaaggcctacgaccagcagctgcaggcgggtgacaatccgtacctgcggtataaccacgccgacgccgagtttcaggagcgtctgcaagaagatacgtcttttgggggcaacctcgggcgagcagtcttccaggccaagaagcgggttctcgaacctctcggtctggttgaggaaggcgctaagacggctcctggaaagaagagaccggtagagccatcaccccagcgttctccagactcctctacgggcatcggcaagaagggccaacagcccgccagaaaaagactcaattttggtcagactggcgactcagagtcagttccagaccctcaacctctcggagaacctccagcagcgccctctggtgtgggacctaatacaatggctgcaggcggtggcgcaccaatggcagacaataacgaaggcgccgacggagtgggtagttcctcgggaaattggcattgcgattccacatggctgggcgacagagtcatcaccaccagcacccgaacctgggccctgcccacctacaacaaccacctctacaagcaaatctccaacgggacatcgggaggagccaccaacgacaacacctacttcggctacagcaccccctgggggtattttgactttaacagattccactgccacttttcaccacgtgactggcagcgactcatcaacaacaactggggattccggcccaagagactcagcttcaagctcttcaacatccaggtcaaggaggtcacgcagaatgaaggcaccaagaccatcgccaataacctcaccagcaccatccaggtgtttacggactcggagtaccagctgccgtacgttctcggctctgcccaccagggctgcctgcctccgctcccggcggacgtgttcacgattccccagtacggctacctaacactcaacaacggtagtcaggccgtgggacgctcctccttctactgcctggaatactttccttcgcagatgctgagaaccggcaacaacttccagtttacttacaccttcgaggacgtgcctttccacagcagctacgcccacagccagagcttggaccggctgatgaatcctctgattgaccagtacctgtactacttgtctcggattcaaacaacaggaggcacggcaaatacgcagactctgggcttcagccaaggtgggcctaatacaatggccaatcaggcaaagaactggctgccaggaccctgttaccgccaacaacgcgtctcaacgacaaccgggcaaaacaacaatagcaactttgcctggactgctgggaccaaataccatctgaatggaagaaattcattggctaatcctggcatcgctatggcaacacacaaagacgacgaggagcgtttttttcccagtaacgggatcctgatttttggcaaacaaaatgctgccagagacaatgcggattacagcgatgtcatgcccaccagcgaggaagaaatcaaaaccactaaccctgtggccacagaggaatacggtatcgtggcagataacttgcagcagcaaaacacggctcctcaaattggaactgtcaacagccagggggccttacccggtatggtctggcagaaccgggacgtgtacctgcagggtcccatctgggccaagattcctcacacggacggcaacttccacccgtctccgctgatgggcggctttggcctgaaacatcctccgcctcagatcctgatcaagaacacgcctgtacctgcggatcctccgaccaccttcaaccagtcaaagctgaactctttcatcacgcaatacagcaccggacaggtcagcgtggaaattgaatgggagctgcagaaggaaaacagcaagcgctggaaccccgagatccagtacacctccaactactacaaatctacaagtgtggactttgctgttaatacagaaggcgtgtactctgaaccccgccccattggcacccgttacctcacccgtaatctgtaa

SEQ ID NO: 3822 - DNA, 2217 bp, Artificial Sequence
  source: /note="Description of Artificial Sequence: Synthetic polynucleotide"
atggctgccgatggttatcttccagattggctcgaggacaacctctctgagggcattcgcgagtggtgggcgctgaaacctggagccccgaagcccaaagccaaccagcaaaagcaggacgacggccggggtctggtgcttcctggctacaagtacctcggacccttcaacggactcgacaagggggagcccgtcaacgcggcggacgcggcggccctcgagcacgacaaggcctacgaccagcagctgcaggcgggtgacaatccgtacctgcggtataaccacgccgacgccgagtttcaggagcgtctgcaagaagatacgtcttttgggggcaacctcgggcgagcagtcttccaggccaagaagcgggttctcgaacctctcggtctggttgaggaaggcgctaagacggctcctggaaagaagagaccggtagagccatcaccccagcgttctccagactcctctacgggcatcggcaagaagggccaacagcccgccagaaaaagactcaattttggtcagactggcgactcagagtcagttccagaccctcaacctctcggagaacctccagcagcgccctctggtgtgggacctaatacaatggctgcaggcggtggcgcaccaatggcagacaataacgaaggcgccgacggagtgggtagttcctcgggaaattggcattgcgattccacatggctgggcgacagagtcatcaccaccagcacccgaacccgggccctgcccacctacaacaaccacctctacaagcaaatctccaacgggacatcgggaggagccaccaacgacaacacctacttcggctacagcaccccctgggggtattttgactttaacagattccactgccacttttcaccacgtgactggcagcgactcatcaacaacaactggggattccggcccaagagactcagcttcaagctcttcaacatccaggtcaaggaggtcacgcagaatgaaggcaccaagaccatcgccaataacctcaccagcaccatccaggtgtttacggactcggagtaccagctgccgtacgttctcggctctgcccaccagggctgcctgcctccgttcccggcggacgtgttcacgattccccagtacggctacctaacactcaacaacggtagtcaggccgtgggacgctcctccttctactgcctggaatactttccttcgcagatgctgagaaccggcaacaacttccagtttacttacaccttcgaggacgtgcctttccacagcagctacgcccacagccagagcttggaccggctgatgaatcctctgattgaccagtacctgtactacttgtctcggattcaaacaacaggaggcacggcaaatacgcagactctgggcttcagccaaggtgggcctaatacaatggccaatcaggcaaagaactggctgccaggaccctgttaccgccaacaacgcgtctcaacgacaaccgggcaaaacaacaatagcaactttgcctggactgctgggaccaaataccatctgaatggaagaaattcattggctaatcctggcatcgctatggcaacacacaaagacgacgaggagcgtttttttcccagtaacgggatcctgatttttggcaaacaaaatgctgccagagacaatgcggattacagcgatgtcatgcccaccagcgaggaagaaatcaaaaccactaaccctgtggccacagaggaatacggtatcgtggcagataacttgcagcagcaaaacacggctcctcaaattggaactgtcaacagccagggggccttacccggtatggtctggcagaaccgggacgtgtacctgcagggtcccatctgggccaagattcctcacacggacggcaacttccacccgtctccgctgatgggcggctttggcctgaaacatcctccgcctcagatcctgatcaagaacacgcctgtacctgcggatcctccgaccaccttcaaccagtcaaagctgaactctttcatcacgcaatacagcaccggacaggtcagcgtggaaattgaatgggagctgcagaaggaaaacagcaagcgctggaaccccgagatccagtacacctccaactactacaaatctacaagtgtggactttgctgttaatacagaaggcgtgtactctgaaccccgccccattggcacccgttacctcacccgtaatctgtaa

SEQ ID NO: 3823 - DNA, 2217 bp, Artificial Sequence
  source: /note="Description of Artificial Sequence: Synthetic polynucleotide"
atggctgccgatggttatcttccagattggctcgaggacaacctctctgagggcattcgcgagtggtgggcgctgaaacctggagccccgaagcccaaagccaaccagcaaaagcaggacgacggccggggtctggtgcttcctggctacaagtacctcggacccttcaacggactcgacaagggggagcccgtcaacgcggcggacgcggcggccctcgagcacgacaaggcctacgaccagcagctgcaggcgggtgacaatccgtacctgcggtataaccacgccgacgccgagtttcaggagcgtctgcaagaagatacgtcttttgggggcaacctcgggcgagcagtcttccaggccaagaagcgggttctcgaacctctcggtctggttgaggaaggcgctaagacggctcctggaaagaagagaccggtagagccatcaccccagcgttctccagactcctctacgggcatcggcaagaagggccaacagcccgccagaaaaagactcaattttggtcagactggcgactcagagtcagttccagaccctcaacctctcggagaacctccagcagcgccctctggtgtgggacctaatacaatggctgcaggcggtggcgcaccaatggcagacaataacgaaggcgccgacggagtgggtagttcctcgggaaattggcattgcgattccacatggctgggcgacagagtcatcaccaccagcacccgaacctgggccctgcccacctacaacaaccacctctacaagcaaatctccaacgggacatcgggaggagccaccaacgacaacacctacttcggctacagcaccccctgggggtattttgactttaacagattccactgccacttttcaccacgtgactggcagcgactcatcaacaacaactggggattccggcccaagagactcagcttcaagctcttcaacatccaggtcaaggaggtcacgcagaatgaaggcaccaagaccatcgccaataacctcaccagcaccatccaggtgtttacggactcggagtaccagctgccgtacgttctcggctctgcccaccagggctgcctgcctccgttcccggcggacgtgttcacgattccccagtacggctacctaacactcaacaacggtagtcaggccgtgggacgctcctccttctactgcctggaatactttccttcgcagatgctgagaaccggcaacaacttccagtttacttacaccttcgaggacgtgcctttccacagcagctacgcccacagccagagcttggaccggctgatgaatcctctgattgaccagtacctgtactacttgtctcggattcaaacaacaggaggcacggcaaatacgcagactctgggcttcagccaaggtgggcctaatacaatggccaatcaggcaaagaactggctgccaggaccctgttaccgccaacaacgcgtctcaacgacaaccgggcaaaacaacaatagcaactttgcctggactgctgggaccaaataccatctgaatggaagaaattcattggctaatcctggcatcgctatgacaacacacaaagacgacgaggagcgtttttttcccagtaacgggatcctgatttttggcaaacaaaatgctgccagagacaatgcggattacagcgatgtcatgcccaccagcgaggaagaaatcaaaaccactaaccctgtggccacagaggaatacggtatcgtggcagataacttgcagcagcaaaacacggctcctcaaattggaactgtcaacagccagggggccttacccggtatggtctggcagaaccgggacgtgtacctgcagggtcccatctgggccaagattcctcacacggacggcaacttccacccgtctccgctgatgggcggctttggcctgaaacatcctccgcctcagatcctgatcaagaacacgcctgtacctgcggatcctccgaccaccttcaaccagtcaaagctgaactctttcatcacgcaatacagcaccggacaggtcagcgtggaaattgaatgggagctgcagaaggaaaacagcaagcgctggaaccccgagatccagtacacctccaactactacaaatctacaagtgtggactttgctgttaatacagaaggcgtgtactctgaaccccgccccattggcacccgttacctcacccgtaatctgtaa

SEQ ID NO: 3824 - DNA, 2217 bp, Artificial Sequence
  source: /note="Description of Artificial Sequence: Synthetic polynucleotide"
atggctgccgatggttatcttccagattggctcgaggacaacctctctgagggcattcgcgagtggtgggcgctgaaacctggagccccgaagcccaaagccaaccagcaaaagcaggacgacggccggggtctggtgcttcctggctacaagtacctcggacccttcaacggactcgacaagggggagcccgtcaacgcggcggacgcggcggccctcgagcacgacaaggcctacgaccagcagctgcaggcgggtgacaatccgtacctgcggtataaccacgccgacgccgagtttcaggagcgtctgcaagaagatacgtcttttgggggcaacctcgggcgagcagtcttccaggccaagaagcgggttctcgaacctctcggtctggttgaggaaggcgctaagacggctcctggaaagaagagaccggtagagccatcaccccagcgttctccagactcctctacgggcatcggcaagaagggccaacagcccgccagaaaaagactcaattttggtcagactggcgactcagagtcagttccagaccctcaacctctcggagaacctccagcagcgccctctggtgtgggacctaatacaatggctgcaggcggtggcgcaccaatggcagacaataacgaaggcgccgacggagtgggtagttcctcgggaaattggcattgcgattccacatggctgggcgacagagtcatcaccaccagcacccgaacctgggccctgcccacctacaacaaccacctctacaagcaaatctccaacgggacatcgggaggagccaccaacgacaacacctacttcggctacagcaccccctgggggtattttgactttaacagattccactgccacttttcaccacgtgactggcagcgactcatcaacaacaactggggattccggcccaagagactcagcttcaagctcttcaacatccaggtcaaggaggtcacgcagaatgaaggcaccaagaccatcgccaataacctcaccagcaccatccaggtgtttacggactcggagtaccagctgccgtacgttctcggctctgcccaccagggctgcctgcctccgttcccggcggacgtgttcacgattccccagtacggctacctaacactcaacaacggtagtcaggccgtgggacgctcctccttctactgcctggaatactttccttcgcagatgctgagaaccggcaacaacttccagtttacttacaccttcgaggacgtgcctttccacagcagctacgcccacagccagagcttggaccggctgatgaatcctctgattgaccagtacctgtactacttgtctcggattcaaacaacaggaggcacggcaaatacgcagactctgggcttcagccaaggtgggcctaatacaatggccaatcaggcaaagaactggctgccaggaccctgttaccgccaacaacgcgtctcaacgacaaccgggcaaaacaacaatagcaactttgcctggactgctgggaccaaataccatctgaatggaagaaattcattggctaatcctggcatcgctatggcaacacacaaagacgacgaggagcgtttttttcccagtaacgggatcctgatttttggcaaacaaaatgctgccagagacaatgcggattacagcgatgtcatgcccaccagcgaggaagaaatcaaaaccactaaccctgtggccacagaggaatacggtatcgtggcagataacttgcagcagcaaaacacggctcctcaaattggaactgtcaacagccagggggtcttacccggtatggtctggcagaaccgggacgtgtacctgcagggtcccatctgggccaagattcctcacacggacggcaacttccacccgtctccgctgatgggcggctttggcctgaaacatcctccgcctcagatcctgatcaagaacacgcctgtacctgcggatcctccgaccaccttcaaccagtcaaagctgaactctttcatcacgcaatacagcaccggacaggtcagcgtggaaattgaatgggagctgcagaaggaaaacagcaagcgctggaaccccgagatccagtacacctccaactactacaaatctacaagtgtggactttgctgttaatacagaaggcgtgtactctgaaccccgccccattggcacccgttacctcacccgtaatctgtaa

SEQ ID NO: 3825 - DNA, 2217 bp, Artificial Sequence
  source: /note="Description of Artificial Sequence: Synthetic polynucleotide"
atggctgccgatggttatcttccagattggctcgaggacaacctctctgagggcattcgcgagtggtgggcgctgaaacctggagccccgaagcccaaagccaaccagcaaaagcaggacgacggccggggtctggtgcttcctggctacaagtacctcggacccttcaacggactcgacaagggggagcccgtcaacgcggcggacgcggcggccctcgagcacgacaaggcctacgaccagcagctgcaggcgggtgacaatccgtacctgcggtataaccacgccgacgccgagtttcaggagcgtctgcaagaagatacgtcttttgggggcaacctcgggcgagcagtcttccaggccaagaagcgggttctcgaacctctcggtctggttgaggaaggcgctaagacggctcctggaaagaagagaccggtagagccatcaccccagcgttctccagactcctctacgggcatcggcaagaagggccaacagcccgccagaaaaagactcaattttggtcagactggcgactcagagtcagttccagaccctcaacctctcggagaacctccagcagcgccctctggtgtgggacctaatacaatggctgcaggcggtggcgcaccaatggcagacaataacgaaggcgccgacggagtgggtagttcctcgggaaattggcattgcgattccacatggctgggcgacagagtcatcaccaccagcacccgaacctgggccctgcccacctacaacaaccacctctacaagcaaatctccaacgggacatcgggaggagccaccaacgacaacacctacttcggctacagcaccccctgggggtattttgactttaacagattccactgccacttttcaccacgtgactggcagcgactcgtcaacaacaactggggattccggcccaagagactcagcttcaagctcttcaacatccaggtcaaggaggtcacgcagaatgaaggcaccaagaccatcgccaataacctcaccagcaccatccaggtgtttacggactcggagtaccagctgccgtacgttctcggctctgcccaccagggctgcctgcctccgttcccggcggacgtgttcacgattccccagtacggctacctaacactcaacaacggtagtcaggccgtgggacgctcctccttctactgcctggaatactttccttcgcagatgctgagaaccggcaacaacttccagtttacttacaccttcgaggacgtgcctttccacagcagctacgcccacagccagagcttggaccggctgatgaatcctctgattgaccagtacctgtactacttgtctcggattcaaacaacaggaggcacggcaaatacgcagactctgggcttcagccaaggtgggcctaatacaatggccaatcaggcaaagaactggctgccaggaccctgttaccgccaacaacgcgtctcaacgacaaccgggcaaaacaacaatagcaactttgcctggactgctgggaccaaataccatctgaatggaagaaattcattggctaatcctggcatcgctatggcaacacacaaagacgacgaggagcgtttttttcccagtaacgggatcctgatttttggcaaacaaaatgctgccagagacaatgcggattacagcgatgtcatgcccaccagcgaggaagaaatcaaaaccactaaccctgtggccacagaggaatacggtatcgtggcrgataacttgcagcagcaaaacacggctcctcaaattggaactgtcaacagccagggggccttacccggtatggtctggcagaaccgggacgtgtacctgcagggtcccatctgggccaagattcctcacacggacggcaacttccacccgtctccgctgatgggcggctttggcctgaaacatcctccgcctcagatcctgatcaagaacacgcctgtacctgcggatcctccgaccaccttcaaccagtcaaagctgaactctttcatcacgcaatacagcaccggacaggtcagcgtggaaattgaatgggagctgcagaaggaaaacagcaagcgctggaaccccgagatccagtacacctccaactactacaaatctacaagtgtggactttgctgttaatacagaaggcgtgtactctgaaccccgccccattggcacccgttacctcacccgtaatctgtaa

SEQ ID NO: 3826 - DNA, 2217 bp, Artificial Sequence
  source: /note="Description of Artificial Sequence: Synthetic polynucleotide"
atggctgccgatggttatcttccagattggctcgaggacaacctctctgagggcattcgcgagtggtgggcgctgaaacctggagccccgaagcccaaagccaaccagcaaaagcaggacgacggccggggtctggtgcttcctggctacaagtacctcggacccttcaacggactcgacaagggggagcccgtcaacgcggcggacgcggcggccctcgagcacgacaaggcctacgaccagcagctgcaggcgggtgacaatccgtacctgcggtataaccacgccgacgccgagtttcgggagcgtctgcaagaagatacgtcttttgggggcaacctcgggcgagcagtcttccaggccaagaagcgggttctcgaacctctcggtctggttgaggaaggcgctaagacggctcctggaaagaagagaccggtagagccatcaccccagcgttctccagactcctctacgggcatcggcaagaagggccaacagcccgccagaaaaagactcaattttggtcagactggcgactcagagtcagttccagaccctcaacctctcggagaacctccagcagcgccctctggtgtgggacctaatacaatggctgcaggcggtggcgcaccaatggcagacaataacgaaggcgccgacggagtgggtagttcctcgggaaattggcattgcgattccacatggctgggcgacagagtcatcaccaccagcacccgaacctgggccctgcccacctacaacaaccacctctacaagcaaatctccaacgggacatcgggaggagccaccaacgacaacacctacttcggctacagcaccccctgggggtattttgactttaacagattccactgccacttttcaccacgtgactggcagcgactcatcaacaacaactggggattccggcccaagagactcagcttcaagctcttcaacatccaggtcaaggaggtcacgcagaatgaaggcaccaagaccatcgccaataacctcaccagcaccatccaggtgtttacggactcggagtaccagctgccgtacgttctcggctctgcccaccagggctgcctgcctccgttcccggcggacgtgttcacgattccccagtacggctacctaacactcaacaacggtagtcaggccgtgggacgctcctccttctactgcctggaatactttccttcgcagatgctgagaaccggcaacaacttccagtttacttacaccttcgaggacgtgcctttccacagcagctacgcccacagccagagcttggaccggctgatgaatcctctgattgaccagtacctgtactacttgtctcggattcaaacaacaggaggcacggcaaatacgcagactctgggcttcagccaaggtgggcctaatacaatggccaatcaggcaaagaactggctgccaggaccctgttaccgccaacaacgcgtctcaacgacaaccgggcaaaacaacaatagcaactttgcctggactgctgggaccaaataccatctgaatggaagaaattcattggctaatcctggcatcgctatggcaacacacaaagacgacgaggagcgtttttttcccagtaacgggatcctgatttttggcaaacaaaatgctgccagagacaatgcggattacagcgatgtcatgcccaccagcgaggaagaaatcaaaaccactaaccctgtggccacagaggaatacggtatcgtggcagataacttgcagcagcaaaacacggctcctcaaattggaactgtcaacagccagggggccttacccggtatggtctggcagaaccgggacgtgtacctgcagggtcccatctgggccaagattcctcacacggacggcaacttccacccgtctccgctgatgggcggctttggcctgaaacatcctccgcctcagatcctgatcaagaacacgcctgtacctgcggatcctccgaccaccttcaaccagtcaaagctgaactctttcatcacgcaatacagcaccggacaggtcagcgtggaaattgaatgggagctgcagaaggaaaacagcaagcgctggaaccccgagatccagtacacctccaactactacaaatctacaagtgtggactttgctgttaatacagaaggcgtgtactctgaaccccgccccattggcacccgttacctcacccgtaatctgtaa

SEQ ID NO: 3827 - DNA, 2217 bp, Artificial Sequence
  source: /note="Description of Artificial Sequence: Synthetic polynucleotide"
atggctgccgatggttatcttccagattggctcgaggacaacctctctgagggcattcgcgagtggtgggcgctgaaacctggagccccgaagcccaaagccaaccagcaaaagcaggacgacggccggggtctggtgcttcctggctacaagtacctcggacccttcaacggactcgacaagggggagcccgtcaacgcggcggacgcggcggccctcgagcacgacaaggcctacgaccagcagctgcaggcgggtgacaatccgtacctgcggtataaccacgccgacgccgagtttcaggagcgtctgcaagaagatacgtcttttgggggcaacctcgggcgagcagtcttccaggccaagaagcgggttctcgaacctctcggtctggttgaggaaggcgctaagacggctcctggaaagaagagaccggtagagccatcaccccagcgttctccagactcctctacgggcatcggcaagaagggccaacagcccgccagaaaaagactcaattttggtcagactggcgactcagagtcagttccagaccctcaacctctcggagaacctccagcagcgccctctggtgtgggacctaatacaatggctgcaggcggtggcgcaccaatggcagacaataacgaaggcgccgacggagtgggtagttcctcgggaaattggcattgcgattccacatggctgggcgacagagtcatcaccaccagcacccgaacctgggccctgcccacctacaacaaccacctctacaagcaaatctccaacgggacatcgggaggagccaccaacgacaacacctacttcggctacagcaccccctgggggtattttgactttaacagattccactgccacttttcaccacgtgactggcagcgactcatcaacaacaactggggattccggcccaagagactcagcttcaagctcttcaacatccaggtcaaggaggtcacgcagaatgaaggcaccaagaccatcgccaataacctcaccagcaccatccaggtgtttacggactcggagtaccagctgccgtacgttctcggctctgcccaccagggctgcctgcctccgttcccggcggacgtgttcacgattccccagtacggctacccaacactcaacaacggtagtcaggccgtgggacgctcctccttctactgcctggaatactttccttcgcagatgctgagaaccggcaacaacttccagtttacttacaccttcgaggacgtgcctttccacagcagctacgcccacagccagagcttggaccggctgatgaatcctctgattgaccagtacctgtactacttgtctcggattcaaacaacaggaggcacggcaaatacgcagactctgggcttcagccaaggtgggcctaatacaatggccaatcaggcaaagaactggctgccaggaccctgttaccgccaacaacgcgtctcaacgacaaccgggcaaaacaacaatagcaactttgcctggactgctgggaccaaataccatctgaatggaagaaattcattggctaatcctggcatcgctatggcaacacacaaagacgacgaggagcgtttttttcccagtaacgggatcctgatttttggcaaacaaaatgctgccagagacaatgcggattacagcgatgtcatgcccaccagcgaggaagaaatcaaaaccactaaccctgtggccacagaggaatacggtatcgtggcagataacttgcagcagcaaaacacggctcctcaaattggaactgtcaacagccagggggccttacccggtatggtctggcagaaccgggacgtgtacctgcagggtcccatctgggccaagattcctcacacggacggcaacttccacccgtctccgctgatgggcggctttggcctgaaacatcctccgcctcagatcctgatcaagaacacgcctgtacctgcggatcctccgaccaccttcaaccagtcaaagctgaactctttcatcacgcaatacagcaccggacaggtcagcgtggaaattgaatgggagctgcagaaggaaaacagcaagcgctggaaccccgagatccagtacacctccaactactacaaatctacaagtgtggactttgctgttaatacagaaggcgtgtactctgaaccccgccccattggcacccgttacctcacccgtaatctgtaa

SEQ ID NO: 3828 - DNA, 2217 bp, Artificial Sequence
  source: /note="Description of Artificial Sequence: Synthetic polynucleotide"
atggctgccgatggttatcttccagattggctcgaggacaacctctctgagggcattcgcgagtggtgggcgctgaaacctggagccccgaagcccaaagccaaccagcaaaagcaggacgacggccggggtctggtgcttcctggctacaagtacctcggacccttcaacggactcgacaagggggagcccgtcaacgcggcggacgcggcggccctcgagcacgacaaggcctacgaccagcagctgcaggcgggtgacaatccgtacctgcggtataaccacgccgacgccgagtttcaggagcgtctgcaagaagatacgtcttttgggggcaacctcgggcgagcagtcttccaggccaagaagcgggttctcgaacctctcggtctggttgaggaaggcgctaagacggctcctggaaagaagagaccggtagagccatcaccccagcgttctccagactcctctacgggcatcggcaagaagggccaacagcccgccagaaaaagactcaattttggtcagactggcgactcagagtcagttccagaccctcaacctctcggagaacctccagcagcgccctctggtgtgggacctaatacaatgactgcaggcggtggcgcaccaatggcagacaataacgaaggcgccgacggagtgggtagttcctcgggaaattggcattgcgattccacatggctgggcgacagagtcatcaccaccagcacccgaacctgggccctgcccacctacaacaaccacctctacaagcaaatctccaacgggacatcgggaggagccaccaacgacaacacctacttcggctacagcaccccctgggggtattttgactttaacagattccactgccacttttcaccacgtgactggcagcgactcatcaacaacaactggggattccggcccaagagactcagcttcaagctcttcaacatccaggtcaaggaggtcacgcagaatgaaggcaccaagaccatcgccaataacctcaccagcaccatccaggtgtttacggactcggagtaccagctgccgtacgttctcggctctgcccaccagggctgcctgcctccgttcccggcggacgtgttcacgattccccagtacggctacctaacactcaacaacggtagtcaggccgtgggacgctcctccttctactgcctggaatactttccttcgcagatgctgagaaccggcaacaacttccagtttacttacaccttcgaggacgtgcctttccacagcagctacgcccacagccagagcttggaccggctgatgaatcctctgattgaccagtacctgtactacttgtctcggattcaaacaacaggaggcacggcaaatacgcagactctgggcttcagccaaggtgggcctaatacaatggccaatcaggcaaagaactggctgccaggaccctgttaccgccaacaacgcgtctcaacgacaaccgggcaaaacaacaatagcaactttgcctggactgctgggaccaaataccatctgaatggaagaaattcattggctaatcctggcatcgctatggcaacacacaaagacgacgaggagcgtttttttcccagtaacgggatcctgatttttggcaaacaaaatgctgccagagacaatgcggattacagcgatgtcatgcccaccagcgaggaagaaatcaaaaccactaaccctgtggccacagaggaatacggtatcgtggcagataacttgcagcagcaaaacacggctcctcaaattggaactgtcaacagccagggggccttacccggtatggtctggcagaaccgggacgtgtacctgcagggtcccatctgggccaagattcctcacacggacggcaacttccacccgtctccgctgatgggcggctttggcctgaaacatcctccgcctcagatcctgatcaagaacacgcctgtacctgcggatcctccgaccaccttcaaccagtcaaagctgaactctttcatcacgcaatacagcaccggacaggtcagcgtggaaattgaatgggagctgcagaaggaaaacagcaagcgctggaaccccgagatccagtacacctccaactactacaaatctacaagtgtggactttgctgttaatacagaaggcgtgtactctgaaccccgccccattggcacccgttacctcacccgtaatctgtaa

SEQ ID NO: 3829 - DNA, 2217 bp, Artificial Sequence
  source: /note="Description of Artificial Sequence: Synthetic polynucleotide"
atggctgccgatggttatcttccagattggctcgaggacaacctctctgagggcattcgcgagtggtgggcgctgaaacctggagccccgaagcccaaagccaaccagcaaaagcaggacgacggccggggtctggtgcttcctggctacaagtacctcggacccttcaacggactcgacaagggggagcccgtcaacgcggcggacgcggcggccctcgagcacgacaaggcctacgaccagcagctgcaggcgggtgacaatccgtacctgcggtataaccacgccgacgccgagtttcaggagcgtctgcaagaagatacgtcttttgggggcaacctcgggcgagcagtcttccaggccaagaagcgggttctcgaacctctcggtctggttgaggaaggcgctaagacggctcctggaaagaagagaccggtagagccatcaccccagcgttctccagactcctctacgggcatcggcaagaagggccaacagcccgccagaaaaagactcaattttggtcagactggcgactcagagtcagttccagaccctcaacctctcggagaacctccagcagcgccctctggtgtgggacctaatacaatggctgcaggcggtggcgcaccaatggcagacaataacgaaggcgccgacggagtgggtagttcctcgggaaattggcattgcgattccacatggctgggcgacagagtcatcaccaccagcacccgaacctgggccctgcccacctacaacaaccacctctacaagcaaatctccaacgggacatcgggaggagccaccaacgacaacacctacttcggctacagcaccccctgggggtattttgactttaacagattccactgccacttttcaccacgtgactggcagcgactcatcaacaacaactggggattccggcccaagagactcagcttcaagctcttcaacatccaggtcaaggaggtcacgcagaatgaaggcaccaagaccatcgccaataacctcaccagcaccatccaggtgtttacggactcggagtaccagctgccgtacgttctcggctctgcccaccagggctgcctgcctccgttcccggcggacgtgttcacgattccccagtacggctacctaacactcaacaacggtagtcaggccgtgggacgctcctccttctactgcctggaatactttccttcgcagatgctgagaaccggcaacaacttccagtttacttacaccttcgaggacgtgcctttccacagcagctacgcccacagccagagcttggaccggctgatgaatcctctgattgaccagtacctgtactacttgtctcggattcaaacaacaggaggcacggcaaatacgcagactctgggcttcagccaaggtgggcctaatacaatggccaatcaggcaaagaactggctgccaggaccctgttaccgccaacaacgcgtctcaacgacaaccgggcaaaacaacaatagcaactttgcctggactgctgggaccaaataccatctgaatggaagaaattcattggctaatcctggcatcgctatggcaacacacaaagacgacgaggagcgtttttttcccagtaacgggatcctgatttttggcaaacaaaatgctgccagagacaatgcggattacagcgatgtcatgcccaccagcgaggaagaaatcaaaaccactaaccctgtggccacagaggaatacggtatcgtgacagataacttgcagcagcaaaacacggctcctcaaattggaactgtcaacagccagggggccttacccggtatggtctggcagaaccgggacgtgtacctgcagggtcccatctgggccaagattcctcacacggacggcaacttccacccgtctccgctgatgggcggctttggcctgaaacatcctccgcctcagatcctgatcaagaacacgcctgtacctgcggatcctccgaccaccttcaaccagtcaaagctgaactctttcatcacgcaatacagcaccggacaggtcagcgtggaaattgaatgggagctgcagaaggaaaacagcaagcgctggaaccccgagatccagtacacctccaactactacaaatctacaagtgtggactttgctgttaatacagaaggcgtgtactctgaaccccgccccattggcacccgttacctcacccgtaatctgtaa

SEQ ID NO: 3830 - DNA, 2217 bp, Artificial Sequence
  source: /note="Description of Artificial Sequence: Synthetic polynucleotide"
atggctgccgatggttatcttccagattggctcgaggacaacctctctgagggcattcgcgagtggtgggcgctgaaacctggagccccgaagcccaaagccaaccagcaaaagcaggacgacggccggggtctggtgcttcctggctacaagtacctcggacccttcaacggactcgacaagggggagcccgtcaacgcggcggacgcggcggccctcgagcacgacaaggcctacgaccagcagctgcaggcgggtgacaatccgtacctgcggtataaccacgccgacgccgagtttcaggagcgtctgcaagaagatacgtcttttgggggcaacctcgggcgagcagtcttccaggccaagaagcgggttctcgaacctctcggtctggttgaggaaggcgctaagacggctcctggaaagaagagaccggtagagccatcaccccagcgttctccagactcctctacgggcatcggcaagaagggccaacagcccgccagaaaaagactcaattttggtcagactggcgactcagagtcagttccagaccctcaacctctcggagaacctccagcagcgccctctggtgtgggacctaatacaatggctgcaggcggtggcgcaccaatggcagacaataacgaaggcgccgacggagtgggtagttcctcgggaaattggcattgcgattccacatggctgggcgacagagtcatcaccaccagcacccgaacctgggccctgcccacctacaacaaccacctctacaagcaaatctccaacgggacatcgggaggagccaccaacgacaacacctacttcggctacagcaccccctgggggtattttgactttaacagattccactgccacttttcaccacgtgactggcagcgactcatcaacaacaactggggattccggcccaagagactcagcttcaagctcttcaacatccaggtcaaggaggtcacgcagaatgaaggcaccaagaccatcgccaataacctcaccagcaccatccaggtgtttacggactcggagtaccagctgccgtacgttctcggctctgcccaccagggctgcctgcctccgttcccggcggacgtgttcacgattccccagtacggctacctaacactcaacaacggtagtcaggccgtgggacgctcctccttctactgcctggaatactttccttcgcagatgctgagaaccggcaacaacttccagtttacttacaccttcgaggacgtgcctttccacagcagctacgcccacagccagagcttggaccggctgatgaatcctctgattgaccagtacctgtactacttgtctcggattcaaacaacaggaggcacggcaaatacgcagactctgggcttcagccaaggtgggcctaatacaatggccaatcaggcaaagaactggctgccaggaccctgttaccgccaacaacgcgtctcaacgacaaccgggcaaaacaacaatagcaactttgcctggactgctgggaccaaataccatctgaatggaagaaattcattggctaatcctggcatcgctatggcaacacacaaagacgacgaggagcgtttttttcccagtaacgggatcctgatttttggcaaacaaaatgctgccagagacaatgcggattacagcgatgtcatgcccaccagcgaggaagaaatcaaaaccactaaccctgtggccacagaggaatacggtatcgtggcagataacttgcagcagcaaaacacggctcctcaaattggaactgtcaacagccagggggccttacccggtatggtctggcagaaccgggacgtgtacctgcagggtcccatctgggccaagattcctcacacggacggcaacttccacccgtctccgctgatgggcggctttggcctgaaacatcctccgcctcagatcctgatcaagaacacgcctgtacctgcggatcctccgaccaccttcaaccagtcaaagctgaactctttcatcacgcaatacagcaccggacaggtcagcgtggaaattgaatgggagctgcagaaggaaaacagcaagcgctggaaccccgagatccagtacacctccaactactacaaatctacaagtgtggactttgctattaatacagaaggcgtgtactctgaaccccgccccattggcacccgttacctcacccgtaatctgtaa

SEQ ID NO: 3831 - DNA, 2217 bp, Artificial Sequence
  source: /note="Description of Artificial Sequence: Synthetic polynucleotide"
atggctgccgatggttatcttccagattggctcgaggacaacctctctgagggcattcgcgagtggtgggcgctgaaacctggagccccgaagcccaaagccaaccagcaaaagcaggacgacggccggggtctggtgcttcctggctacaagtacctcggacccttcaacggactcgacaagggggagcccgtcaacgcggcggacgcggcggccctcgagcacgacaaggcctacgaccagcagctgcaggcgggtgacaatccgtacctgcggtataaccacgccgacgccgagtttcaggagcgtctgcaagaagatacgtcttttgggggcaacctcgggcgagcagtcttccaggccaagaagcgggttctcgaacctctcggtctggttgaggaaggcgctaagacggctcctggaaagaagagaccggtagagccatcaccccagcgttctccagactcctctacgggcatcggcaagaagggccaacagcccgccagaaaaagactcaattttggtcagactggcgactcagagtcagttccagaccctcaacctctcggagaacctccagcagcgccctctggtgtgggacctaatacaatggctgcaggcggtggcgcaccaatggcagacaataacgaaggcgccgacggagtgggtagttcctcgggaaattggcattgcgattccacatggctgggcgacagagtcatcaccaccagcacccgaacctgggccctgcccacctacaacaaccacctctacaagcaaatctccaacgggacatcgggaggagccaccaacgacaacacctacttcggctacagcaccccctgggggtattttgactttaacagattccactgccacttttcaccacgtgactggcagcgactcatcaacaacaactggggattccggcccaagagactcagcttcaagctcttcaacatccaggtcaaggaggtcacgcagaatgaaggcaccaagaccatcgccaataacctcaccagcaccatccaggtgtttacggactcggagtaccagctgccgtacgttctcggctctgcccaccagggctgcctgcctccgttcccggcggacgtgttcacgattccccagtacggctacctaacactcaacaacggtagtcaggccgtgggacgctcctccttctactgcctggaatactttccttcgcagatgctgagaaccggcaacaacttccagtttacttacaccttcgaggacgtgcctttccacagcagctacgcccacagccagagcttggaccggctgatgaatcctctgattgaccagtacctgtactacttgtctcggattcaaacaacaggaggcacggcaaatacgcagactctgggcttcagccaaggtgggcctaatacaatggccaatcaggcaaagaactggctgccaggaccctgttaccgccaacaacgcgtctcaacgacaaccgggcaaaacaacaatagcaactttgcctggactgctgggaccaaataccatctgaatggaagaaattcattggctaatcctggcatcgctatggcaacacacaaagacgacgaggagcgtttttttcccagtaacgggatcctgatttttggcaaacaaaatgctgccagagacaatgcggattacagcgatgtcatgcccaccagcgaggaagaaatcaaaaccactaaccctgtggccacagaggaatacggtatcgtggcagataacttgcagcagcaaaacacggctcctcaaattggaactgtcaacagccagggggccttacccggtatggtctggcagaaccgggacgtgtacctgcagggtcccatctgggccaagattcctcacgcggacggcaacttccacccgtctccgctgatgggcggctttggcctgaaacatcctccgcctcagatcctgatcaagaacacgcctgtacctgcggatcctccgaccaccttcaaccagtcaaagctgaactctttcatcacgcaatacagcaccggacaggtcagcgtggaaattgaatgggagctgcagaaggaaaacagcaagcgctggaaccccgagatccagtacacctccaactactacaaatctacaagtgtggactttgctgttaatacagaaggcgtgtactctgaaccccgccccattggcacccgttacctcacccgtaatctgtaa

SEQ ID NO: 3832 - DNA, 2217 bp, Artificial Sequence
  source: /note="Description of Artificial Sequence: Synthetic polynucleotide"
atggctgccgatggttatcttccagattggctcgaggacaacctctctgagggcattcgcgagtggtgggcgctgaaacctggagccccgaagcccaaagccaaccagcaaaagcaggacgacggccggggtctggtgcttcctggctacaagtacctcggacccttcaacggactcgacaagggggagcccgtcaacgcggcggacgcggcggccctcgagcacgacaaggcctacgaccagcagctgcaggcgggtgacaatccgtacctgcggtataaccacgccgacgccgagtttcaggagcgtctgcaagaagatacgtcttttgggggcaacctcgggcgagcagtcttccaggccaagaagcgggttctcgaacctctcggtctggttgaggaaggcgctaagacggctcctggaaagaagagaccggtagagccatcaccccagcgttctccagactcctctacgggcatcggcaagaagggccaacagcccgccagaaaaagactcaattttggtcagactggcgactcagagtcagttccagaccctcaacctctcggagaacctccagcagcgccctctggtgtgggacctaatacaatggctgcaggcggtggcgcaccaatggcagacaataacgaaggcgccgacggagtgggtagttcctcgggaaattggcattgcaattccacatggctgggcgacagagtcatcaccaccagcacccgaacctgggccctgcccacctacaacaaccacctctacaagcaaatctccaacgggacatcgggaggagccaccaacgacaacacctacttcggctacagcaccccctgggggtattttgactttaacagattccactgccacttttcaccacgtgactggcagcgactcatcaacaacaactggggattccggcccaagagactcagcttcaagctcttcaacatccaggtcaaggaggtcacgcagaatgaaggcaccaagaccatcgccaataacctcaccagcaccatccaggtgtttacggactcggagtaccagctgccgtacgttctcggctctgcccaccagggctgcctgcctccgttcccggcggacgtgttcacgattccccagtacggctacctaacactcaacaacggtagtcaggccgtgggacgctcctccttctactgcctggaatactttccttcgcagatgctgagaaccggcaacaacttccagtttacttacaccttcgaggacgtgcctttccacagcagctacgcccacagccagagcttggaccggctgatgaatcctctgattgaccagtacctgtactacttgtctcggattcaaacaacaggaggcacggcaaatacgcagactctgggcttcagccaaggtgggcctaatacaatggccaatcaggcaaagaactggctgccaggaccctgttaccgccaacaacgcgtctcaacgacaaccgggcaaaacaacaatagcaactttgcctggactgctgggaccaaataccatctgaatggaagaaattcattggctaatcctggcatcgctatggcaacacacaaagacgacgaggagcgtttttttcccagtaacgggatcctgatttttggcaaacaaaatgctgccagagacaatgcggattacagcgatgtcatgcccaccagcgaggaagaaatcaaaaccactaaccctgtggccacagaggaatacggtatcgtggcagataacttgcagcagcaaaacacggctcctcaaattggaactgtcaacagccagggggccttacccggtatggtctggcagaaccgggacgtgtacctgcagggtcccatctgggccaagattcctcacacggacggcaacttccacccgtctccgctgatgggcggctttggcctgaaacatcctccgcctcagatcctgatcaagaacacgcctgtacctgcggatcctccgaccaccttcaaccagtcaaagctgaactctttcatcacgcaatacagcaccggacaggtcagcgtggaaattgaatgggagctgcagaaggaaaacagcaagcgctggaaccccgagatccagtacacctccaactactacaaatctacaagtgtggactttgctgttaatacagaaggcgtgtactctgaaccccgccccattggcacccgttacctcacccgtaatctgtaa

SEQ ID NO: 3833 - DNA, 2217 bp, Artificial Sequence
  source: /note="Description of Artificial Sequence: Synthetic polynucleotide"
atggctgccgatggttatcttccagattggctcgaggacaacctctctgagggcattcgcgagtggtgggcgctgaaacctggagccccgaagcccaaagccaaccagcaaaagcaggacgacggccggggtctggtgcttcctggctacaagtacctcggacccttcaacggactcgacaagggggagcccgtcaacgcggcggacgcggcggccctcgagcacgacaaggcctacgaccagcagctgcaggcgggtgacaatccgtacctgcggtataaccacgccgacgccgagtttcaggagcgtctgcaagaagatacgtcttttgggggcaacctcgggcgagcagtcttccaggccaagaagcgggttctcgaacctctcggtctggttgaggaaggcgctaagacggctcctggaaagaagagaccggtagagccatcaccccagcgttctccagactcctctacgggcatcggcaagaagggccaacagcccgccagaaaaagactcaattttggtcagactggcgactcagagtcagttccagaccctcaacctctcggagaacctccagcagcgccctctggtgtgggacctaatacaatggctgcaggcggtggcgcaccaatggcagacaataacgaaggcgccgacggagtgggtagttcctcgggaaattggcattgcgattccacatggctgggcgacagagtcatcaccaccagcacccgaacctgggccctgcccacctacaacaaccacctctacaagcaaatctccaacgggacatcgggaggagccaccaacgacaacacctacttcggctacagcaccccctgggggtattttgactttaacagattccactgccacttttcaccacgtgactggcagcgactcatcaacaacaactggggattccggcccaagagactcagcttcaagctcttcaacatccaggtcaaggaggtcacgcagaatgaaggcaccaagaccatcgccaataacctcaccagcaccatccaggtgtttacggactcggagtaccagctgccgtacgttctcggctctgcccaccagggctgcctgcctccgttcccggcggacgtgttcacgattccccagtacggctacctaacactcaacaacggtagtcaggccgtgggacgctcctccttctactgcctggaatactttccttcgcagatgctgagaaccggcaacaacttccagtttacttacaccttcgaggacgtgcctttccacagcagctacgcccacagccagagcttggaccggctgatgaatcctctgattgaccagtacctgtactacttgtctcggattcaaacaacaggaggcacggcaaatacgcagactctgggcttcagccaaggtgggcctaatacaatggccaatcaggcaaagaactggctgccaggaccctgttaccgccaacaacgcgtctcaacgacaaccgggcaaaacaacaatagcaactttgcctggactgctgggaccaaataccatctgaatggaagaaattcattggctaatcctggcatcgctatggcaacacacaaagacgacgaggagcgtttttttcccagtaacgggatcctgatttttggcaaacaaaatgctgccagagacaatgcggattacagcgatgtcatgcccaccagcgaggaagaaatcaaaaccactaaccctgtggccacagaggaatacggtatcgtggcagataacttgcagcagcaaaacacggctcctcaaattggaactgtcaacagccagggggccttacccggtatggtctggcagaaccgggacgtgtacctgcagggtcccatctgggccaagattcctcacacggacggcaacttccacccgtctccgctgatgggcggctttggcctgaaacatcctccgcctcagatcctgatcaagaacacgcctgtacctgcggatcctccgaccaccttcaaccagtcaaagctgaactctttcatcacgcaatacagcaccggacaggtcagcgtggaaattgaatgggagctgcagaaggaaaacagcaagcgctggaaccccgagatccagtacacctccaactactacaaatctacaagtgtggactttgctgttaatacagaaggcgcgtactctgaaccccgccccattggcacccgttacctcacccgtaatctgtaa

SEQ ID NO: 3834 - DNA, 2217 bp, Artificial Sequence
  source: /note="Description of Artificial Sequence: Synthetic polynucleotide"
atggctgccgatggttatcttccagattggctcgaggacaacctctctgagggcattcgcgagtggtgggcgctgaaacctggagccccgaagcccaaagccaaccagcaaaagcaggacgacggccggggtctggtgcttcctggctacaagtacctcggacccttcaacggactcgacaagggggagcccgtcaacgcggcggacgcggcggccctcgagcacgacaaggcctacgaccagcagctgcaggcgggtgacaatccgtacctgcggtataaccacgccgacgccgagtttcaggagcgtctgcaagaagatacgtcttttgggggcaacctcgggcgagcagtcttccaggccaagaagcgggttctcgaacctctcggtctggttgaggaaggcgctaagacggctcctggaaagaagagaccggtagagccatcaccccagcgttctccagactcctctacgggcatcggcaagaagggccaacagcccgccagaaaaagactcaattttggtcagactggcgactcagagtcagttccagaccctcaacctctcggagaacctccagcagcgccctctggtgtgggacctaatacaatggctgcaggcggtggcgcaccaatggcagacaataacgaaggcgccgacggagtgggtagttcctcgggaaattggcattgcgattccacatggctgggcgacagagtcatcaccaccagcacccgaacctgggccctgcccacctacaacaaccacctctacaagcaaatctccaacgggacatcgggaggagccaccaacgacaacacctacttcggctacagcaccccctgggggtattttgactttaacagattccactgccacttttcaccacgtgactggcagcgactcatcaacaacaactggggattccggcccaagagactcagcttcaagctcttcaacatccaggtcaaggaggtcacgcagaatgaaggcaccaagaccatcgccaataacctcaccagcaccatccaggtgtttacggactcggagtaccagctgccgtacgttctcggctctgcccaccagggctgcctgcctccgttcccggcggacgtgttcacgattccccagtacggctacctaacactcaacaacggtagtcaggccgtgggacgctcctccttctactgcctggaatactttccttcgcagatgctgagaaccggcaacaacttccagtttacttacaccttcgaggacgtgcctttccacagcagctacgcccacagccagagcttggaccggctgatgaatcctctgattgaccagtacctgtactacttgtctcggattcaaacaacaggaggcacggcaaatacgcagactctgggcttcagccaaggtgggcctaatacaatggccaatcaggcaaagaactggctgccaggaccctgttaccgccaacaacgcgtctcaacgacaaccgggcaaaacaacaatagcaactttgcctggactgctgggaccaaataccatctgaatggaagaaattcattggctaatcctggcatcgctatggcaacacacaaagacgacgaggagcgtttttttcccagtaacgggatcctgatttttggcaaacaaaatgctgccagagacaatgcggattacagcgatgtcatgcccaccagcgaggaagaaatcaaaaccactaaccctgtggccacagaggaatgcggtatcgtggcagataacttgcagcagcaaaacacggctcctcaaattggaactgtcaacagccagggggccttacccggtatggtctggcagaaccgggacgtgtacctgcagggtcccatctgggccaagattcctcacacggacggcaacttccacccgtctccgctgatgggcggctttggcctgaaacatcctccgcctcagatcctgatcaagaacacgcctgtacctgcggatcctccgaccaccttcaaccagtcaaagctgaactctttcatcacgcaatacagcaccggacaggtcagcgtggaaattgaatgggagctgcagaaggaaaacagcaagcgctggaaccccgagatccagtacacctccaactactacaaatctacaagtgtggactttgctgttaatacagaaggcgtgtactctgaaccccgccccattggcacccgttacctcacccgtaatctgtaa

SEQ ID NO: 3835 - DNA, 2217 bp, Artificial Sequence
  source: /note="Description of Artificial Sequence: Synthetic polynucleotide"
atggctgccgatggttatcttccagattggctcgaggacaacctctctgagggcattcgcgagtggtgggcgctgaaacctggagccccgaagcccaaagccaaccagcaaaagcaggacgacggccggggtctggtgcttcctggctacaagtacctcggacccttcaacggactcgacaagggggagcccgtcaacgcggcggacgcggcggccctcgagcacgacaaggcctacgaccagcagctgcaggcgggtgacaatccgtacctgcggtataaccacgccgacgccgagtttcaggagcgtctgcaagaagatacgtcttttgggggcaacctcgggcgagcagtcttccaggccaagaagcgggttctcgaacctctcggtctggttgaggaaggcgctaagacggctcctggaaagaagagaccggtagagccatcaccccagcgttctccagactcctctacgggcatcggcaagaagggccaacagcccgccagaaaaagactcaattttggtcagactggcgactcagagtcagttccagaccctcaacctctcggagaacctccagcagcgccctctggtgtgggacctaatacaatggctgcaggcggtggcgcaccaatggcagacaataacgaaggcgccgacggagtgggtagttcctcgggaaattggcattgcgattccacatggctgggcgacagagtcatcaccaccagcacccgaacctgggccctgcccacctacaacaaccacctctacaagcaaatctccaacgggacatcgggaggagccaccaacgacaacacctacttcggctacagcaccccctgggggtattttgactttaacagattccactgccacttttcaccacgtgactggcagcgactcatcaacaacaactggggattccggcccaagagactcagcttcaagctcttcaacatccaggtcaaggaggtcacgcagaatgaaggcaccaagaccatcgccaataacctcaccagcaccatccaggtgtttacggactcggagtaccagctgccgtacgttctcggctctgcccaccagggctgcctgcctccgttcccggcggacgtgttcacgattccccagtacggctacctaacactcaacaacggtagtcaggccgtgggacgctcctccttctactgcctggaatactttccttcgcagatgctgagaaccggcaacaacttccagtttacttacaccttcgaggacgtgcctttccacagcagctacgcccacagccagagcttggaccggctgatgaatcctctgattgaccagtacctgtactacttgtctcggattcaaacaacaggaggcacggcaaatacgcagactctgggcttcagccaaggtgggcctaatacaatggccaatcaggcaaagaactggctgccaggaccctgttaccgccaacaacgcgtctcaacgacaaccgggcaaaacaacaatagcaactttgcctggactgctgggaccaaataccatctgaatggaagaaattcattggctaatcctggcatcgctatggcaacacacaaagacgacgaggagcgtttttttcccagtaacgggatcctgatttttggcaaacaaaatgctgccagagacaatgcggattacagcgatgtcatgcccaccagcgaggaagaaatcaaaaccactaaccctgtggccacagaggaatacggtatcgtggcagataacttgcagcagcaaaacacggctcctcaaattggaactgtcaacagccagggggccttacccggtatggtctggcagaaccgggacgtgtacctgcagggtcccatctgggccaagattcctcacacggacggcaacttccacccgtctccgctgatgggcggctttggcctgaaacatcctccgcctcagatcctgatcaagaacacgcctgtacctgcggatcctccgaccaccttcaaccagtcaaagctgaactctttcatcacgcaatacagcaccggacaggtcagcgtggaaattgaatgggagctgcagaaggaaaacagcaagcgctggaaccccgagatccggtacacctccaactactacaaatctacaagtgtggactttgctgttaatacagaaggcgtgtactctgaaccccgccccattggcacccgttacctcacccgtaatctgtaa

SEQ ID NO: 3836 - DNA, 2217 bp, Artificial Sequence
  source: /note="Description of Artificial Sequence: Synthetic polynucleotide"
atggctgccgatggttatcttccagattggctcgaggacaacctctctgagggcattcgcgagtggtgggcgctgaaacctggagccccgaagcccaaagccaaccagcaaaagcaggacgacggccggggtctggtgcttcctggctacaagtacctcggacccttcaacggactcgacaagggggagcccgtcaacgcggcggacgcggcggccctcgagcacgacaaggcctacgaccagcagctgcaggcgggtgacaatccgtacctgcggtataaccacgccgacgccgagtttcaggagcgtctgcaagaagatacgtcttttgggggcaacctcgggcgagcagtcttccaggccaagaagcgggttctcgaacctctcggtctggttgaggaaggcgctaagacggctcctggaaagaagagaccggtagagccatcaccccagcgttctccagactcctctacgggcatcggcaagaagggccaacagcccgccagaaaaagactcaattttggtcagactggcgactcagagtcagttccagaccctcaacctctcggagaacctccagcagcgccctctggtgtgggacctaatacaatggctgcaggcggtggcgcaccaatggcagacaataacgaaggcgccgacggagtgggtagttcctcgggaaattggcattgcgattccacatggctgggcgacagagtcatcaccaccagcacccgaacctgggccctgcccacctacaacaaccacctctacaagcaaatctccaacgggacatcgggaggagccaccaacgacaacacctacttcggctacagcaccccctgggggtattttgactttaacagattccactgccacttttcaccacgtgactggcagcgactcatcaacaacaactggggattccggcccaagagactcagcttcaagctcttcaacatccaggtcaaggaggtcacgcagaatgaaggcaccaagaccatcgccaataacctcaccagcaccatccaggtgtttacggactcggagtaccagctgccgtacgttctcggctctgcccaccagggctgcctgcctccgttcccggcggacgtgttcacgattccccagtacggctacctaacactcaacaacggtagtcaggccgtgggacgctcctccttctactgcctggaatactttccttcgcagatgctgagaaccggcaacaacttccagtttacttacaccttcgaggacgtgcctttccacagcagctacgcccacagccagagcttggaccggctgatgaatcctctgattgaccagtacctgtactacttgtctcggattcaaacaacaggaggcacggcaaatacgcagactctgggcttcagccaaggtgggcctaatacaatggccaatcaggcaaagaactggctgccaggaccctgttaccgccaacaacgcgtctcaacgacaaccgggcaaaacaacaatagcaactttgcctggactgctgggaccaaataccatctgaatggaagaaattcattggctaatcctggcatcgctatggcaacacacaaagacgacgaggagcgtttttttcccagtaacgggatcctgatttttggcaaacaaaatgctgccagagacaatgcggattgcagcgatgtcatgcccaccagcgaggaagaaatcaaaaccactaaccctgtggccacagaggaatacggtatcgtggcagataacttgcagcagcaaaacacggctcctcaaattggaactgtcaacagccagggggccttacccggtatggtctggcagaaccgggacgtgtacctgcagggtcccatctgggccaagattcctcacacggacggcaacttccacccgtctccgctgatgggcggctttggcctgaaacatcctccgcctcagatcctgatcaagaacacgcctgtacctgcggatcctccgaccaccttcaaccagtcaaagctgaactctttcatcacgcaatacagcaccggacaggtcagcgtggaaattgaatgggagctgcagaaggaaaacagcaagcgctggaaccccgagatccagtacacctccaactactacaaatctacaagtgtggactttgctgttaatacagaaggcgtgtactctgaaccccgccccattggcacccgttacctcacccgtaatctgtaa

SEQ ID NO: 3837 - DNA, 2217 bp, Artificial Sequence
  source: /note="Description of Artificial Sequence: Synthetic polynucleotide"
atggctgccgatggttatcttccagattggctcgaggacaacctctctgagggcattcgcgagtggtgggcgctgaaacctggagccccgaagcccaaagccaaccagcaaaagcaggacgacggccggggtctggtgcttcctggctacaagtacctcggacccttcaacggactcgacaagggggagcccgtcaacgcggcggacgcggcggccctcgagcacgacaaggcctacgaccagcagctgcaggcgggtgacaatccgtacctgcggtataaccacgccgacgccgagtttcaggagcgtctgcaagaagatacgtcttttgggggcaacctcgggcgagcagtcttccaggccaagaagcgggttctcgaacctctcggtctggttgaggaaggcgctaagacggctcctggaaagaagagaccggtagagccatcaccccagcgttctccagactcctctacgggcatcggcaagaagggccaacagcccgccagaaaaagactcaattttggtcagactggcgactcagagtcagttccagaccctcaacctctcggagaacctccagcagcgccctctggtgtgggacctaatacaatggctgcaggcggtggcgcaccaatggcagacaataacgaaggcgccgacggagtgggtagttcctcgggaaattggcattgcgattccacatggctgggcgacagagtcatcaccaccagcacccgaacctgggccctgcccacctacaacaaccacctctacaagcaaatctccaacgggacatcgggaggagccaccaacgacaacacctacttcggctacagcaccccctgggggtattttgactttaacagattccactgccacttttcaccacgtgactggcagcgactcatcaacaacaactggggattccggcccaagagactcagcttcaagctcttcaacatccaggtcaaggaggtcacgcagaatgaaggcaccaagaccatcgccaataacctcaccagcaccatccaggtgtttacggactcggagtaccagctgccgtacgttctcggctctgcccaccagggctgcctgcctccgttcccggcggacgtgttcacgattccccagtacggctacctaacactcaacaacggtagtcaggccgtgggacgctcctccttctactgcctggaatactttccttcgcagatgctgagaaccggcaacaacttccagtttacttacaccttcgaggacgtgcctttccacagcagctacgcccacagccagagcttggaccggctgatgaatcctctgattgaccagtacctgtactacttgtctcggattcaaacaacaggaggcacggcaaatacgcagactctgggcttcagccaaggtgggcctaatacaatggccaatcaggcaaagaactggctgccaggaccctgttaccgccaacaacgcgtctcaacgacaaccgggcaaaacaacaatagcaactttgcctggactgctgggaccaaataccatctgaatggaagaaattcattggctaatcctggcatcgctatggcaacacacaaagacgacgaggagcgtttttttcccagtaacgggatcctgatttttggcaaacaaaatgctgccagagacaatgcggattacagcgatgtcatgcccaccagcgaggaagaaatcaaaaccactaaccctgtggccacagaggaatacggtatcgcggcagataacttgcagcagcaaaacacggctcctcaaattggaactgtcaacagccagggggccttacccggtatggtctggcagaaccgggacgtgtacctgcagggtcccatctgggccaagattcctcacacggacggcaacttccacccgtctccgctgatgggcggctttggcctgaaacatcctccgcctcagatcctgatcaagaacacgcctgtacctgcggatcctccgaccaccttcaaccagtcaaagctgaactctttcatcacgcaatacagcaccggacaggtcagcgtggaaattgaatgggagctgcagaaggaaaacagcaagcgctggaaccccgagatccagtacacctccaactactacaaatctacaagtgtggactttgctgttaatacagaaggcgtgtactctgaaccccgccccattggcacccgttacctcacccgtaatctgtaa

SEQ ID NO: 3838 - DNA, 2217 bp, Artificial Sequence
  source: /note="Description of Artificial Sequence: Synthetic polynucleotide"
atggctgccgatggttatcttccagattggctcgaggacaacctctctgagggcattcgcgagtggtgggcgctgaaacctggagccccgaagcccaaagccaaccagcaaaagcaggacgacggccggggtctggtgcttcctggctacaagtacctcggacccttcaacggactcgacaagggggagcccgtcaacgcggcggacgcggcggccctcgagcacgacaaggcctacgaccagcagctgcaggcgggtgacaatccgtacctgcggtataaccacgccgacgccgagtttcaggagcgtctgcaagaagatacgtcttttgggggcaacctcgggcgagcagtcttccaggccaagaagcgggttctcgaacctctcggtctggttgaggaaggcgctaagacggctcctggaaagaagagaccggtagagccatcaccccagcgttctccagactcctctacgggcatcggcaagaagggccaacagcccgccagaaaaagactcaattttggtcagactggcgactcagagtcagttccagaccctcaacctctcggagaacctccagcagcgccctctggtgtgggacctaatacaatggctgcaggcggtggcgcaccaatggcagacaataacgaaggcgccgacggagtgggtagttcctcgggaaattggcattgcgattccacatggctgggcgacagagtcatcaccaccagcacccgaacctgggccctgcccacctacaacaaccacctctacaagcaaatctccaacgggacatcgggaggagccaccaacgacaacacctacttcggctacagcaccccctgggggtattttgactttaacagattccactgccacttttcaccacgtgactggcagcgactcatcaacaacaactggggattccggcccaagagactcagcttcaagctcttcaacatccaggtcaaggaggtcacgcagaatgaaggcaccaagaccatcgccaataacctcaccagcaccatccaggtgtttacggactcggagtaccagctgccgtacgttctcggctctgcccaccagggctgcctgcctccgttcccggcggacgtgttcacgattccccagtacggctacctaacactcaacaacggtagtcaggccgtgggacgctcctccttctactgcctggaatactttccttcgcagatgctgagaaccggcaacaacttccagtttacttacaccttcgaggacgtgcctttccacagcagctacgcccacagccagagcttggaccggctgatgaatcctctgattgaccagtacctgtactacttgtctcggattcaaacaacaggaggcacggcaaatacgcagactctgggcttcagccaaggtgggcctaatacaatggccaatcaggcaaagaactggctgccaggaccctgttaccgccaacaacgcgtctcaacgacaaccgggcaaaacaacaatagcaactttgcctggactgctgggaccaaataccatctgaatggaagaaattcattggctaatcctggcatcgctatggcaacacacaaagacgacgaggagcgtttttttcccagtaacgggatcctgatttttggcaaacaaaatgctgccagagacaatgcggattacagcgatgtcatgcccaccagcgaggaagaaatcaaaaccactaaccctgtggccacagaggaatacggtatcgtggcagataacttgcagcagcaaaacacggctcctcaaattggaactgtcaacagccagggggccttacccggtatgatctggcagaaccgggacgtgtacctgcagggtcccatctgggccaagattcctcacacggacggcaacttccacccgtctccgctgatgggcggctttggcctgaaacatcctccgcctcagatcctgatcaagaacacgcctgtacctgcggatcctccgaccaccttcaaccagtcaaagctgaactctttcatcacgcaatacagcaccggacaggtcagcgtggaaattgaatgggagctgcagaaggaaaacagcaagcgctggaaccccgagatccagtacacctccaactactacaaatctacaagtgtggactttgctgttaatacagaaggcgtgtactctgaaccccgccccattggcacccgttacctcacccgtaatctgtaa

SEQ ID NO: 3839 - DNA, 2217 bp, Artificial Sequence
  source: /note="Description of Artificial Sequence: Synthetic polynucleotide"
atggctgccgatggttatcttccagattggctcgaggacaacctctctgagggcattcgcgagtggtgggcgctgaaacctggagccccgaagcccaaagccaaccagcaaaagcaggacgacggccggggtctggtgcttcctggctacaagtacctcggacccttcaacggactcgacaagggggagcccgtcaacgcggcggacgcggcggccctcgagcacgacaaggcctacgaccagcggctgcaggcgggtgacaatccgtacctgcggtataaccacgccgacgccgagtttcaggagcgtctgcaagaagatacgtcttttgggggcaacctcgggcgagcagtcttccaggccaagaagcgggttctcgaacctctcggtctggttgaggaaggcgctaagacggctcctggaaagaagagaccggtagagccatcaccccagcgttctccagactcctctacgggcatcggcaagaagggccaacagcccgccagaaaaagactcaattttggtcagactggcgactcagagtcagttccagaccctcaacctctcggagaacctccagcagcgccctctggtgtgggacctaatacaatggctgcaggcggtggcgcaccaatggcagacaataacgaaggcgccgacggagtgggtagttcctcgggaaattggcattgcgattccacatggctgggcgacagagtcatcaccaccagcacccgaacctgggccctgcccacctacaacaaccacctctacaagcaaatctccaacgggacatcgggaggagccaccaacgacaacacctacttcggctacagcaccccctgggggtattttgactttaacagattccactgccacttttcaccacgtgactggcagcgactcatcaacaacaactggggattccggcccaagagactcagcttcaagctcttcaacatccaggtcaaggaggtcacgcagaatgaaggcaccaagaccatcgccaataacctcaccagcaccatccaggtgtttacggactcggagtaccagctgccgtacgttctcggctctgcccaccagggctgcctgcctccgttcccggcggacgtgttcacgattccccagtacggctacctaacactcaacaacggtagtcaggccgtgggacgctcctccttctactgcctggaatactttccttcgcagatgctgagaaccggcaacaacttccagtttacttacaccttcgaggacgtgcctttccacagcagctacgcccacagccagagcttggaccggctgatgaatcctctgattgaccagtacctgtactacttgtctcggattcaaacaacaggaggcacggcaaatacgcagactctgggcttcagccaaggtgggcctaatacaatggccaatcaggcaaagaactggctgccaggaccctgttaccgccaacaacgcgtctcaacgacaaccgggcaaaacaacaatagcaactttgcctggactgctgggaccaaataccatctgaatggaagaaattcattggctaatcctggcatcgctatggcaacacacaaagacgacgaggagcgtttttttcccagtaacgggatcctgatttttggcaaacaaaatgctgccagagacaatgcggattacagcgatgtcatgcccaccagcgaggaagaaatcaaaaccactaaccctgtggccacagaggaatacggtatcgtggcagataacttgcagcagcaaaacacggctcctcaaattggaactgtcaacagccagggggccttacccggtatggtctggcagaaccgggacgtgtacctgcagggtcccatctgggccaagattcctcacacggacggcaacttccacccgtctccgctgatgggcggctttggcctgaaacatcctccgcctcagatcctgatcaagaacacgcctgtacctgcggatcctccgaccaccttcaaccagtcaaagctgaactctttcatcacgcaatacagcaccggacaggtcagcgtggaaattgaatgggagctgcagaaggaaaacagcaagcgctggaaccccgagatccagtacacctccaactactacaaatctacaagtgtggactttgctgttaatacagaaggcgtgtactctgaaccccgccccattggcacccgttacctcacccgtaatctgtaa

SEQ ID NO: 3840 - DNA, 2217 bp, Artificial Sequence
  source: /note="Description of Artificial Sequence: Synthetic polynucleotide"
atggctgccgatggttatcttccagattggctcgaggacaacctctctgagggcattcgcgagtggtgggcgctgaaacctggagccccgaagcccaaagccaaccagcaaaagcaggacgacggccggggtctggtgcttcctggctacaagtacctcggacccttcaacggactcgacaagggggagcccgtcaacgcggcggacgcggcggccctcgagcacgacaaggcctacgaccagcagctgcaggcgggtgacaatccgtacctgcggtataaccacgccgacgccgagtttcaggagcgtctgcaagaagatacgtcttttgggggcaacctcgggcgagcagtcttccaggccaagaagcgggttctcgaacctctcggtctggttgaggaaggcgctaagacggctcctggaaagaagagaccggtagagccatcaccccagcgttctccagactcctctacgggcatcggcaagaagggccaacagcccgccagaaaaagactcaattttggtcagactggcgactcagagtcagttccagaccctcaacctctcggagaacctccagcagcgccctctggtgtgggacctaatacaatggctgcaggcggtggcgcaccaatggcagacaataacgaaggcgccgacggagtgggtagttcctcgggaaattggcattgcgattccacatggctgggcgacagagtcatcaccaccagcacccgaacctgggccctgcccacctacaacaaccacctctacaagcaaatctccaacgggacatcgggaggagccaccaacgacaacacctacttcggctacagcaccccctgggggtattttgactttaacagattccactgccacttttcaccacgtgactggcagcgactcatcaacaacaactggggattccggcccaagagactcagcttcaagctcttcaacatccaggtcaaggaggtcacgcagaatgaaggcaccaagaccatcgccaataacctcaccagcaccatccaggtgtttacggactcggagtaccagctgccgtacgttctcggctctgcccaccagggctgcctgcctccgttcccggcggacgtgttcacgattccccagtacggctacctaacactcaacaacggtagtcaggccgtgggacgctcctccttctactgcctggaatactttccttcgcagatgctgagaaccggcaacaacttccagtttacttacaccttcgaggacgtgcctttccacagcagctacgcccacagccagagcttggaccggctgatgaatcctctgattgaccagtacctgtactacttgtctcggattcaaacaacaggaggcacggcaaatacgcagactctgggcttcagccaaggtgggcctaatacaatggccaatcaggcaaagaactggctgccaggaccctgttaccgccaacaacgcgtctcaacgacaaccgggcaaaacaacaatagcaactttgcctggactgctgggaccaaataccatctgaatggaagaaattcattggctaatcctggcatcgctatggcaacacacaaagacgacgaggagcgtttttttcccagtaacgggatcctgatttttggcaaacaaaatgctgccagagacaatgcggattacagcgatgtcatgcccaccagcgaggaagaaatcaaaaccactaaccctgtggccacagaggaatacggtatcgtggcagataacttgcagcagcaaaacacggctcctcaaattggaactgtcaacggccagggggccttacccggtatggtctggcagaaccgggacgtgtacctgcagggtcccatctgggccaagattcctcacacggacggcaacttccacccgtctccgctgatgggcggctttggcctgaaacatcctccgcctcagatcctgatcaagaacacgcctgtacctgcggatcctccgaccaccttcaaccagtcaaagctgaactctttcatcacgcaatacagcaccggacaggtcagcgtggaaattgaatgggagctgcagaaggaaaacagcaagcgctggaaccccgagatccagtacacctccaactactacaaatctacaagtgtggactttgctgttaatacagaaggcgtgtactctgaaccccgccccattggcacccgttacctcacccgtaatctgtaa

SEQ ID NO: 3841 - DNA, 2217 bp, Artificial Sequence
  source: /note="Description of Artificial Sequence: Synthetic polynucleotide"
atggctgccgatggttatcttccagattggctcgaggacaacctctctgagggcattcgcgagtggtgggcgctgaaacctggagccccgaagcccaaagccaaccagcaaaagcaggacgacggccggggtctggtgcttcctggctacaagtacctcggacccttcaacggactcgacaagggggagcccgtcaacgcggcggacgcggcggccctcgagcacgacaaggcctacgaccagcagctgcaggcgggtgacaatccgtacctgcggtataaccacgccgacgccgagtttcaggagcgtctgcaagaagatacgtcttttgggggcaacctcgggcgagcagtcttccaggccaagaagcgggttctcgaacctctcggtctggttgaggaaggcgctaagacggctcctggaaagaagagaccggtagagccatcaccccagcgttctccagactcctctacgggcatcggcaagaagggccaacagcccgccagaaaaagactcaattttggtcagactggcgactcagagtcagttccagaccctcaacctctcggagaacctccagcagcgccctctggtgtgggacctaatacaatggctgcaggcggtggcgcaccaatggcagacaataacgaaggcgccgacggagtgggtagttcctcgggaaattggcattgcgattccacatggctgggcgacagagtcatcaccaccagcacccgaacctgggccctgcccacctacaacaaccacctctacaagcaaatctccaacgggacatcgggaggagccaccaacgacaacacctacttcggctacagcaccccctgggggtattttgactttaacagattccactgccacttttcaccacgtgactggcagcgactcatcaacaacaactggggattccggcccaagagactcagcttcaagctcttcaacatccaggtcaaggaggtcacgcagaatgaaggcaccaagaccatcgccaataacctcaccagcaccatccaggtgtttacggactcggagtaccagctgccgtacgttctcggctctgcccaccagggctgcctgcctccgttcccggcggacgtgttcacgattccccagtacggctacctaacactcaacaacggtagtcaggccgtgggacgctcctccttctactgcctggaatactttccttcgcagatgctgagaaccggcaacaacttccagtttacttacaccttcgaggacgtgcctttccacagcagctacgcccacagccagagcttggaccggctgatgaatcctctgattgaccagtacctgtactacttgtctcggattcaaacaacaggaggcacggcaaatacgcagactctgggcttcagccaaggtgggcctaatacaatggccaatcaggcaaagaactggctgccaggaccctgttaccgccaacaacgcgtctcaacgacaaccgggcaaaacaacaatagcaactttgcctggactgctgggaccaaataccatctgaatggaagaaattcattggctaatcctggcatcgctatggcaacacacaaagacgacgaggagtgtttttttcccagtaacgggatcctgatttttggcaaacaaaatgctgccagagacaatgcggattacagcgatgtcatgcccaccagcgaggaagaaatcaaaaccactaaccctgtggccacagaggaatacggtatcgtggcagataacttgcagcagcaaaacacggctcctcaaattggaactgtcaacagccagggggccttacccggtatggtctggcagaaccgggacgtgtacctgcagggtcccatctgggccaagattcctcacacggacggcaacttccacccgtctccgctgatgggcggctttggcctgaaacatcctccgcctcagatcctgatcaagaacacgcctgtacctgcggatcctccgaccaccttcaaccagtcaaagctgaactctttcatcacgcaatacagcaccggacaggtcagcgtggaaattgaatgggagctgcagaaggaaaacagcaagcgctggaaccccgagatccagtacacctccaactactacaaatctacaagtgtggactttgctgttaatacagaaggcgtgtactctgaaccccgccccattggcacccgttacctcacccgtaatctgtaa

SEQ ID NO: 3842 - DNA, 2217 bp, Artificial Sequence
  source: /note="Description of Artificial Sequence: Synthetic polynucleotide"
atggctgccgatggttatcttccagattggctcgaggacaacctctctgagggcattcgcgagtggtgggcgctgaaacctggagccccgaagcccaaagccaaccagcaaaagcaggacgacggccggggtctggtgcttcctggctacaagtacctcggacccttcaacggactcgacaagggggagcccgtcaacgcggcggacgcggcggccctcgagcacgacaaggcctacgaccagcagctgcaggcgggtgacaatccgtacctgcggtataaccacgccgacgccgagtttcaggagcgtctgcaagaagatacgtcttttgggggcaacctcgggcgagcagtcttccaggccaagaagcgggttctcgaacctctcggtctggttgaggaaggcgctaagacggctcctggaaagaagagaccggtagagccatcaccccagcgttctccagactcctctacgggcatcggcaagaagggccaacagcccgccagaaaaagactcaattttggtcagactggcgactcagagtcagttccagaccctcaacctctcggagaacctccagcagcgccctctggtgtgggacctaatacaatggctgcaggcggtggcgcaccaatggcagacaataacgaaggcgccgacggagtgggtagttcctcgggaaattggcattgcgattccacatggctgggcgacagagtcatcaccaccagcacccgaacctgggccctgcccacctacaacaaccacctctacaagcaaatctccaacgggacatcgggaggagccaccaacgacaacacctacttcggctacagcaccccctgggggtattttgactttaacagattccactgccacttttcaccacgtgactggcagcgactcatcaacaacaactggggattccggcccaagagactcagcttcaagctcttcaacatccaggtcaaggaggtcacgcagaatgaaggcaccaagaccatcgccaataacctcaccagcaccatccaggtgtttacggactcggagtaccagctgccgtacgttctcggctctgcccaccagggctgcctgcctccgttcccggcggacgtgttcacgattccccagtacggctacctaacactcaacaacggtagtcaggccgtgggacgctcctccttctactgcctggaatactttccttcgcagatgctgagaaccggcaacaacttccagtttacttacaccttcgaggacgtgcctttccacagcagctacgcccacagccagagcttggaccggctgatgaatcctctgattgaccagtacctgtactacttgtctcggattcaaacaacaggaggcacggcaaatacgcagactctgggcttcagccaaggtgggcctaatacaatggccaatcaggcaaagaactggctgccaggaccctgttaccgccaacaacgcgtctcaacgacaaccgggcaaaacaacaatagcaactttgcctggactgctgggaccaaataccatctgaatggaagaaattcattggctaatcctggcatcgctatggcaacacacaaagacgacgaggagcgtttttttcccagtaacgggatcctgatttttggcaaacaaaatgctgccagagacaatgcggattacagcgatgtcatgcccaccagcgaggaagaaatcaaaaccactaaccctgtggccacagaggaatacggtatcgtggcagataacttgcagcagcaaaacacggctcctcaaattggaactgtcaacagccagggggccttacccggtatggtctggcagaaccgggacgcgtacctgcagggtcccatctgggccaagattcctcacacggacggcaacttccacccgtctccgctgatgggcggctttggcctgaaacatcctccgcctcagatcctgatcaagaacacgcctgtacctgcggatcctccgaccaccttcaaccagtcaaagctgaactctttcatcacgcaatacagcaccggacaggtcagcgtggaaattgaatgggagctgcagaaggaaaacagcaagcgctggaaccccgagatccagtacacctccaactactacaaatctacaagtgtggactttgctgttaatacagaaggcgtgtactctgaaccccgccccattggcacccgttacctcacccgtaatctgtaa

SEQ ID NO: 3843 - DNA, 2217 bp, Artificial Sequence
  source: /note="Description of Artificial Sequence: Synthetic polynucleotide"
atggctgccgatggttatcttccagattggctcgaggacaacctctctgagggcattcgcgagtggtgggcgctgaaacctggagccccgaagcccaaagccaaccagcaaaagcaggacgacggccggggtctggtgcttcctggctacaagtacctcggacccttcaacggactcgacaagggggagcccgtcaacgcggcggacgcggcggccctcgagcacgacaaggcctacgaccagcagctgcaggcgggtgacaatccgtacctgcggtataaccacgccgacgccgagtttcaggagcgtctgcaagaagatacgtcttttgggggcaacctcgggcgagcagtcttccaggccaagaagcgggttctcgaacctctcggtctggttgaggaaggcgctaagacggctcctggaaagaagagaccggtagagccatcaccccagcgttctccagactcctctacgggcatcggcaagaagggccaacagcccgccagaaaaagactcaattttggtcagactggcgactcagagtcagttccagaccctcaacctctcggagaacctccagcagcgccctctggtgtgggacctaatacaatggctgcaggcggtggcgcaccaatggcagacaataacgaaggcgccgacggagtgggtagttcctcgggaaattggcattgcgattccacatggctgggcgacagagtcatcaccaccagcacccgaacctgggccctgcccacctacaacaaccacctctacaagcaaatctccaacgggacatcgggaggagccaccaacgacaacacctacttcggctacagcaccccctgggggtattttgactttaacagattccactgccacttttcaccacgtgactggcagcgactcatcaacaacaactggggattccggcccaagagactcagcttcaagctcttcaacatccaggtcaaggaggtcacgcagaatgaaggcaccaagaccatcgccaataacctcaccagcaccatccaggtgtttacggactcggagtaccagctgccgtacgttctcggctctgcccaccagggctgcctgcctccgttcccggcggacgtgttcacgattccccagtacggctacctaacactcaacaacggtagtcaggccgcgggacgctcctccttctactgcctggaatactttccttcgcagatgctgagaaccggcaacaacttccagtttacttacaccttcgaggacgtgcctttccacagcagctacgcccacagccagagcttggaccggctgatgaatcctctgattgaccagtacctgtactacttgtctcggattcaaacaacaggaggcacggcaaatacgcagactctgggcttcagccaaggtgggcctaatacaatggccaatcaggcaaagaactggctgccaggaccctgttaccgccaacaacgcgtctcaacgacaaccgggcaaaacaacaatagcaactttgcctggactgctgggaccaaataccatctgaatggaagaaattcattggctaatcctggcatcgctatggcaacacacaaagacgacgaggagcgtttttttcccagtaacgggatcctgatttttggcaaacaaaatgctgccagagacaatgcggattacagcgatgtcatgcccaccagcgaggaagaaatcaaaaccactaaccctgtggccacagaggaatacggtatcgtggcagataacttgcagcagcaaaacacggctcctcaaattggaactgtcaacagccagggggccttacccggtatggtctggcagaaccgggacgtgtacctgcagggtcccatctgggccaagattcctcacacggacggcaacttccacccgtctccgctgatgggcggctttggcctgaaacatcctccgcctcagatcctgatcaagaacacgcctgtacctgcggatcctccgaccaccttcaaccagtcaaagctgaactctttcatcacgcaatacagcaccggacaggtcagcgtggaaattgaatgggagctgcagaaggaaaacagcaagcgctggaaccccgagatccagtacacctccaactactacaaatctacaagtgtggactttgctgttaatacagaaggcgtgtactctgaaccccgccccattggcacccgttacctcacccgtaatctgtaa

SEQ ID NO: 3844 - DNA, 2217 bp, Artificial Sequence
  source: /note="Description of Artificial Sequence: Synthetic polynucleotide"
atggctgccgatggttatcttccagattggctcgaggacaacctctctgagggcattcgcgagtggtgggcgctgaaacctggagccccgaagcccaaagccaaccagcaaaagcaggacgacggccggggtctggtgcttcctggctacaagtacctcggacccttcaacggactcgacaagggggagcccgtcaacgcggcggacgcggcggccctcgagcacgacaaggcctacgaccagcagctgcaggcgggtgacaatccgtacctgcggtataaccacgccgacgccgagtttcaggagcgtctgcaagaagatacgtcttttgggggcaacctcgggcgagcagtcttccaggccaagaagcgggttctcgaacctctcggtctggttgaggaaggcgctaagacggctcctggaaagaagagaccggtagagccatcaccccagcgttctccagactcctctacgggcatcggcaagaagggccaacagcccgccagaaaaagactcaattttggtcagactggcgactcagagtcagttccagaccctcaacctctcggagaacctccagcagcgccctctggtgtgggacctaatacaatggctgcaggcggtggcgcaccaatggcagacaataacgaaggcgccgacggagtgggtagttcctcgggaaattggcattgcgattccacatggctgggcgacagagtcatcaccaccagcacccgaacctgggccctgcccacctacaacaaccacctctacaagcaaatctccaacgggacatcgggaggagccaccaacgacaacacctacttcggctacagcaccccctgggggtattttgactttaacagattccactgccacttttcaccacgtgactggcagcgactcatcaacaacaactggggattccggcccaagagactcagcttcaagctcttcaacatccaggtcaaggaggtcacgcagaatgaaggcaccaagaccatcgccaataacctcaccagcaccatccaggtgtttacggactcggagtaccagctgccgtacgttctcggctctgcccaccagggctgcctgcctccgttcccggcggacgtgttcacgattccccagtacggctacctaacactcaacaacggtagtcaggccgtgggacgctcctccttctactgcctggaatactttccttcgcagatgctgagaaccggcaacaacttccagtttacttacaccttcgaggacgtgcctttccacagcagctacgcccacagccagagcttggaccggctgatgaatcctctgattgaccagtacctgtactacttgtctcggattcaaacaacaggaggcacggcaaatacgcagactctgggcttcagccaaggtgggcctaatacaatggccaatcaggcaaagaactggctgccaggaccctgttaccgccaacaacgcgtctcaacgacaaccgggcaaaacaacaatagcaactttgcctggactgctgggaccaaataccatctgaatggaagaaattcattggctaatcctggcatcgctatggcaacacacaaagacgacgaggagcgtttttttcccagtaacgggatcctgatttttggcaaacaaaatgctgccagagacaatgcggattacagcgatgtcatgcccaccagcgaggaagaaatcaaaaccactaaccctgtggccacagaggaatacggtatcgtggcagataacttgcagcagcaaaacacggctcctcaaattggaactgtcaacagccagggggccttacccggtatggtctggcagaaccgggacgtgtacctgcagggtcccatctgggccaagattcctcacacggacggcaacttccacccgtctccgctgatgggcggctttggcctgaaacatcctccgcctcagatcctgatcaagaacacgcctgtacctgcggatcctccgaccaccttcaaccagtcaaagctgaactctttcatcacgcaatacagcaccggacaggtcagcgtggaaattgaatgggagctgcagaaggaaaacagcaagcgctggaaccccgagatccagtacacctccaactactacaaatctacaagtgtggaccttgctgttaatacagaaggcgtgtactctgaaccccgccccattggcacccgttacctcacccgtaatctgtaa

SEQ ID NO: 3845 - DNA, 2217 bp, Artificial Sequence
  source: /note="Description of Artificial Sequence: Synthetic polynucleotide"
atggctgccgatggttatcttccagattggctcgaggacaacctctctgagggcattcgcgagtggtgggcgctgaaacctggagccccgaagcccaaagccaaccagcaaaagcaggacgacggccggggtctggtgcttcctggctacaagtacctcggacccttcaacggactcgacaagggggagcccgtcaacgcggcggacgcggcggccctcgagcacgacaaggcctacgaccagcagctgcaggcgggtgacaatccgtacctgcggtataaccacgccgacgccgagtttcaggagcgtctgcaagaagatacgtcttttgggggcaacctcgggcgagcagtcttccaggccaagaagcgggttctcgaacctctcggtctggttgaggaaggcgctaagacggctcctggaaagaagagaccggtagagccatcaccccagcgttctccagactcctctacgggcatcggcaagaagggccaacagcccgccagaaaaagactcaattttggtcagactggcgactcagagtcagttccagaccctcaacctctcggagaacctccagcagcgccctctggtgtgggacctaatacaatggctgcaggcggtggcgcaccaatggcagacaataacgaaggcgccgacggagtgggtagttcctcgggaaattggcattgcgattccacatggctgggcgacagagtcatcaccaccagcacccgaacctgggccctgcccacctacaacaaccacctctacaagcaaatctccaacgggacatcgggaggagccaccaacgacaacacctacttcggctacagcaccccctgggggtattttgactttaacagattccactgccacttttcaccacgtgactggcagcgactcatcaacaacaactggggattccggcccaagagactcagcttcaagctcttcaacatccaggtcaaggaggtcacgcagaatgaaggcaccaagaccatcgccaataacctcaccagcaccatccaggtgtttacggactcggagtaccagctgccgtacgttctcggctctgcccaccagggctgcctgcctccgttcccggcggacgtgttcacgattccccagtacggctacctaacactcaacaacggtagtcaggccgtgggacgctcctccttctactgcctggaatactttccttcgcagatgctgagaaccggcaacaacttccagtttacttacaccttcgaggacgtgcctttccacagcagctacgcccacagccagagcttggaccggctgatgaatcctctgattgaccagtacctgtactacttgtctcggattcaaacaacaggaggcacggcaaatacgcagactctgggcttcagccaaggtgggcctaatacaatggccaatcaggcaaagaactggctgccaggaccctgttaccgccaacaacgcgtctcaacgacaaccgggcaaaacaacaatagcaactttgcctggactgctgggaccaaataccatctgaatggaagaaattcattggctaatcctggcatcgctatggcaacacacaaagacgacgaggagcgtttttttcccagtaacgggatcctgatttttggcaaacaaaatgctgccagagacaatgcggattacagcgatgtcatgcccaccagcgaggaagaaatcaaaaccactaaccctgtggccacagaggaatacggtatcgtggcagataacttgcagcagcaaaacacggctcctcaaattggaactgtcaacagccagggggccttacccggtatggtctggcagaaccgggacgtgtacctgcagggtcccatctgggccaagattcctcacacggacggcaacttccacccgtctccgctgatgggcggctttggcctgaaacatcctccgcctcagatcctgatcaagaacacgcctgtacctgcggatcctccgaccaccttcaaccagtcaaagctgaactctttcatcacgcaatacagcaccggacaggtcagcgtggaaattgaatgggagccgcagaaggaaaacagcaagcgctggaaccccgagatccagtacacctccaactactacaaatctacaagtgtggactttgctgttaatacagaaggcgtgtactctgaaccccgccccattggcacccgttacctcacccgtaatctgtaa

SEQ ID NO: 3846 - DNA, 2217 bp, Artificial Sequence
  source: /note="Description of Artificial Sequence: Synthetic polynucleotide"
atggctgccgatggttatcttccagattggctcgaggacaacctctctgagggcattcgcgagtggtgggcgctgaaacctggagccccgaagcccaaagccaaccagcaaaagcaggacgacggccggggtctggtgcttcctggctacaagtacctcggacccttcaacggactcgacaagggggagcccgtcaacgcggcggacgcggcggccctcgagcacgacaaggcctacgaccagcagctgcaggcgggtgacaatccgtacctgcggtataaccacgccgacgccgagtttcaggagcgtctgcaagaagatacgtcttttgggggcaacctcgggcgagcagtcttccaggccaagaagcgggttctcgaacctctcggtctggttgaggaaggcgctaagacggctcctggaaagaagagaccggtagagccatcaccccagcgttctccagactcctctacgggcatcggcaagaagggccaacagcccgccagaaaaagactcaattttggtcagactggcgactcagagtcagttccagaccctcaacctctcggagaacctccagcagcgccctctggtgtgggacctaatacaatggctgcaggcggtggcgcaccaatggcagacaataacgaaggcgccgacggagtgggtagttcctcgggaaattggcattgcgattccacatggctgggcgacagagtcatcaccaccagcacccgaacctgggccctgcccacctacaacaaccacctctacaagcaaatctccaacgggacatcgggaggagccaccaacgacaacacctacttcggctacagcaccccctgggggtattttgactttaacagattccactgccacttttcaccacgtgactggcagcgacccatcaacaacaactggggattccggcccaagagactcagcttcaagctcttcaacatccaggtcaaggaggtcacgcagaatgaaggcaccaagaccatcgccaataacctcaccagcaccatccaggtgtttacggactcggagtaccagctgccgtacgttctcggctctgcccaccagggctgcctgcctccgttcccggcggacgtgttcacgattccccagtacggctacctaacactcaacaacggtagtcaggccgtgggacgctcctccttctactgcctggaatactttccttcgcagatgctgagaaccggcaacaacttccagtttacttacaccttcgaggacgtgcctttccacagcagctacgcccacagccagagcttggaccggctgatgaatcctctgattgaccagtacctgtactacttgtctcggattcaaacaacaggaggcacggcaaatacgcagactctgggcttcagccaaggtgggcctaatacaatggccaatcaggcaaagaactggctgccaggaccctgttaccgccaacaacgcgtctcaacgacaaccgggcaaaacaacaatagcaactttgcctggactgctgggaccaaataccatctgaatggaagaaattcattggctaatcctggcatcgctatggcaacacacaaagacgacgaggagcgtttttttcccagtaacgggatcctgatttttggcaaacaaaatgctgccagagacaatgcggattacagcgatgtcatgcccaccagcgaggaagaaatcaaaaccactaaccctgtggccacagaggaatacggtatcgtggcagataacttgcagcagcaaaacacggctcctcaaattggaactgtcaacagccagggggccttacccggtatggtctggcagaaccgggacgtgtacctgcagggtcccatctgggccaagattcctcacacggacggcaacttccacccgtctccgctgatgggcggctttggcctgaaacatcctccgcctcagatcctgatcaagaacacgcctgtacctgcggatcctccgaccaccttcaaccagtcaaagctgaactctttcatcacgcaatacagcaccggacaggtcagcgtggaaattgaatgggagctgcagaaggaaaacagcaagcgctggaaccccgagatccagtacacctccaactactacaaatctacaagtgtggactttgctgttaatacagaaggcgtgtactctgaaccccgccccattggcacccgttacctcacccgtaatctgtaa

SEQ ID NO: 3847 - DNA, 2217 bp, Artificial Sequence
  source: /note="Description of Artificial Sequence: Synthetic polynucleotide"
atggctgccgatggttatcttccagattggctcgaggacaacctctctgagggcattcgcgagtggtgggcgctgaaacctggagccccgaagcccaaagccaaccagcaaaagcaggacgacggccggggtctggtgcttcctggctacaagtacctcggacccttcaacggactcgacaagggggagcccgtcaacgcggcggacgcggcggccctcgagcacgacaaggcctacgaccagcagctgcaggcgggtgacaatccgtacctgcggtataaccacgccgacgccgagtttcaggagcgtctgcaagaagatacgtcttttgggggcaacctcgggcgagcagtcttccaggccaagaagcgggttctcgaacctctcggtctggttgaggaaggcgctaagacggctcctggaaagaagagaccggtagagccatcaccccagcgttctccagactcctctacgggcatcggcaagaagggccaacagcccgccagaaaaagactcaattttggtcagactggcgactcagagtcagttccagaccctcaacctctcggagaacctccagcagcgccctctggtgtgggacctaatacaatggctgcaggcggtggcgcaccaatggcagacaataacgaaggcgccgacggagtgggtagttcctcgggaaattggcattgcgattccacatggctgggcgacagagtcatcaccaccagcacccgaacctgggccctgcccacctacaacaaccacctctacaagcaaatctccaacgggacatcgggaggagccaccaacgacaacacctacttcggctacagcaccccctgggggtattttgactttaacagattccactgccacttttcaccacgtgactggcagcgactcatcaacaacaactggggattccggcccaagagactcagcttcaagctcttcaacatccaggtcaaggaggtcacgcagaatgaaggcaccaagaccatcgccaataacctcaccagcaccatccaggtgtttacggactcggagtaccagctgccgtacgttctcggctctgcccaccagggctgcctgcctccgttcccggcggacgtgttcacgattccccagtacggctacctaacactcaacaacggtagtcaggccgtgggacgctcctccttctactgcctggaatactttccttcgcagatgctgagaaccggcaacaacttccagtttacttacaccttcgaggacgtgcctttccacagcagctacgcccacagccagagcttggaccggctgatgaatcctctgattgaccagtacctgtactacttgtctcggattcaaacaacaggaggcacggcaaatacgcagactctgggcttcagccaaggtgggcctaatacaatggccaatcaggcaaagaactggctgccaggaccctgttaccgccaacaacgcgtctcaacgacaaccgggcaaaacaacaatagcaactttgcctggactgctgggaccaaataccatctgaatggaagaaattcattggctaatcctggcatcgctatggcaacacacaaagacgacgaggagcgtttttttcccagtaacgggatcctgatttttggcaaacaaaatgctgccagagacaatgcggattacagcgatgtcatgcccaccagcgaggaagaaatcaaaaccactaaccctgcggccacagaggaatacggtatcgtggcagataacttgcagcagcaaaacacggctcctcaaattggaactgtcaacagccagggggccttacccggtatggtctggcagaaccgggacgtgtacctgcagggtcccatctgggccaagattcctcacacggacggcaacttccacccgtctccgctgatgggcggctttggcctgaaacatcctccgcctcagatcctgatcaagaacacgcctgtacctgcggatcctccgaccaccttcaaccagtcaaagctgaactctttcatcacgcaatacagcaccggacaggtcagcgtggaaattgaatgggagctgcagaaggaaaacagcaagcgctggaaccccgagatccagtacacctccaactactacaaatctacaagtgtggactttgctgttaatacagaaggcgtgtactctgaaccccgccccattggcacccgttacctcacccgtaatctgtaa

SEQ ID NO: 3848 - DNA, 2217 bp, Artificial Sequence
  source: /note="Description of Artificial Sequence: Synthetic polynucleotide"
atggctgccgatggttatcttccagattggctcgaggacaacctctctgagggcattcgcgagtggtgggcgctgaaacctggagccccgaagcccaaagccaaccagcaaaagcaggacgacggccggggtctggtgcttcctggctacaagtacctcggacccttcaacggactcgacaagggggagcccgtcaacgcggcggacgcggcggccctcgagcacgacaaggcctacgaccagcagctgcaggcgggtgacaatccgtacctgcggtataaccacgccgacgccgagtttcaggagcgtctgcaagaagatacgtcttttgggggcaacctcgggcgagcagtcttccaggccaagaagcgggttctcgaacctctcggtctggttgaggaaggcgctaagacggctcctggaaagaagagaccggtagagccatcaccccagcgttctccagactcctctacgggcatcggcaagaagggccaacagcccgccagaaaaagactcaattttggtcagactggcgactcagagtcagttccagaccctcaacctctcggagaacctccagcagcgccctctggtgtgggacctaatacaatggctgcaggcggtggcgcaccaatggcagacaataacgaaggcgccgacggagtgggtagttcctcgggaaattggcattgcgattccacatggctgggcgacagagtcatcaccaccagcacccgaacctgggccctgcccacctacaacaaccacctctacaagcaaatctccaacgggacatcgggaggagccaccaacgacaacacctacttcggctacagcaccccctgggggtattttgactttaacagattccactgccacttttcaccacgtgactggcagcgactcatcaacaacaactggggattccggcccaagagactcagcttcaagctcttcaacatccaggtcaaggaggtcacgcagaatgaaggcaccaagaccatcgccaataacctcaccagcaccatccaggtgtttacggactcggagtaccagctgccgtacgttctcggctctgcccaccagggctgcctgcctccgttcccggcggacgtgttcacgattccccagtacgactacctaacactcaacaacggtagtcaggccgtgggacgctcctccttctactgcctggaatactttccttcgcagatgctgagaaccggcaacaacttccagtttacttacaccttcgaggacgtgcctttccacagcagctacgcccacagccagagcttggaccggctgatgaatcctctgattgaccagtacctgtactacttgtctcggattcaaacaacaggaggcacggcaaatacgcagactctgggcttcagccaaggtgggcctaatacaatggccaatcaggcaaagaactggctgccaggaccctgttaccgccaacaacgcgtctcaacgacaaccgggcaaaacaacaatagcaactttgcctggactgctgggaccaaataccatctgaatggaagaaattcattggctaatcctggcatcgctatggcaacacacaaagacgacgaggagcgtttttttcccagtaacgggatcctgatttttggcaaacaaaatgctgccagagacaatgcggattacagcgatgtcatgcccaccagcgaggaagaaatcaaaaccactaaccctgtggccacagaggaatacggtatcgtggcagataacttgcagcagcaaaacacggctcctcaaattggaactgtcaacagccagggggccttacccggtatggtctggcagaaccgggacgtgtacctgcagggtcccatctgggccaagattcctcacacggacggcaacttccacccgtctccgctgatgggcggctttggcctgaaacatcctccgcctcagatcctgatcaagaacacgcctgtacctgcggatcctccgaccaccttcaaccagtcaaagctgaactctttcatcacgcaatacagcaccggacaggtcagcgtggaaattgaatgggagctgcagaaggaaaacagcaagcgctggaaccccgagatccagtacacctccaactactacaaatctacaagtgtggactttgctgttaatacagaaggcgtgtactctgaaccccgccccattggcacccgttacctcacccgtaatctgtaa

SEQ ID NO: 3849 - DNA, 2217 bp, Artificial Sequence
  source: /note="Description of Artificial Sequence: Synthetic polynucleotide"
atggctgccgatggttatcttccagattggctcgaggacaacctctctgagggcattcgcgagtggtgggcgctgaaacctggagccccgaagcccaaagccaaccagcaaaagcaggacgacggccggggtctggtgcttcctggctacaagtacctcggacccttcaacggactcgacaagggggagcccgtcaacgcggcggacgcggcggccctcgagcacgacaaggcctacgaccagcagctgcaggcgggtgacaatccgtacctgcggtataaccacgccgacgccgagtttcaggagcgtctgcaagaagatacgtcttttgggggcaacctcgggcgagcagtcttccaggccaagaagcgggttctcgaacctctcggtctggttgaggaaggcgctaagacggctcctggaaagaagagaccggtagagccatcaccccagcgttctccagactcctctacgggcatcggcaagaagggccaacagcccgccagaaaaagactcaattttggtcagactggcgactcagggtcagttccagaccctcaacctctcggagaacctccagcagcgccctctggtgtgggacctaatacaatggctgcaggcggtggcgcaccaatggcagacaataacgaaggcgccgacggagtgggtagttcctcgggaaattggcattgcgattccacatggctgggcgacagagtcatcaccaccagcacccgaacctgggccctgcccacctacaacaaccacctctacaagcaaatctccaacgggacatcgggaggagccaccaacgacaacacctacttcggctacagcaccccctgggggtattttgactttaacagattccactgccacttttcaccacgtgactggcagcgactcatcaacaacaactggggattccggcccaagagactcagcttcaagctcttcaacatccaggtcaaggaggtcacgcagaatgaaggcaccaagaccatcgccaataacctcaccagcaccatccaggtgtttacggactcggagtaccagctgccgtacgttctcggctctgcccaccagggctgcctgcctccgttcccggcggacgtgttcacgattccccagtacggctacctaacactcaacaacggtagtcaggccgtgggacgctcctccttctactgcctggaatactttccttcgcagatgctgagaaccggcaacaacttccagtttacttacaccttcgaggacgtgcctttccacagcagctacgcccacagccagagcttggaccggctgatgaatcctctgattgaccagtacctgtactacttgtctcggattcaaacaacaggaggcacggcaaatacgcagactctgggcttcagccaaggtgggcctaatacaatggccaatcaggcaaagaactggctgccaggaccctgttaccgccaacaacgcgtctcaacgacaaccgggcaaaacaacaatagcaactttgcctggactgctgggaccaaataccatctgaatggaagaaattcattggctaatcctggcatcgctatggcaacacacaaagacgacgaggagcgtttttttcccagtaacgggatcctgatttttggcaaacaaaatgctgccagagacaatgcggattacagcgatgtcatgcccaccagcgaggaagaaatcaaaaccactaaccctgtggccacagaggaatacggtatcgtggcagataacttgcagcagcaaaacacggctcctcaaattggaactgtcaacagccagggggccttacccggtatggtctggcagaaccgggacgtgtacctgcagggtcccatctgggccaagattcctcacacggacggcaacttccacccgtctccgctgatgggcggctttggcctgaaacatcctccgcctcagatcctgatcaagaacacgcctgtacctgcggatcctccgaccaccttcaaccagtcaaagctgaactctttcatcacgcaatacagcaccggacaggtcagcgtggaaattgaatgggagctgcagaaggaaaacagcaagcgctggaaccccgagatccagtacacctccaactactacaaatctacaagtgtggactttgctgttaatacagaaggcgtgtactctgaaccccgccccattggcacccgttacctcacccgtaatctgtaa

SEQ ID NO: 3850 - DNA, 2217 bp, Artificial Sequence
  source: /note="Description of Artificial Sequence: Synthetic polynucleotide"
atggctgccgatggttatcttccagattggctcgaggacaacctctctgagggcattcgcgagtggtgggcgctgaaacctggagccccgaagcccaaagccaaccagcaaaagcaggacgacggccggggtctggtgcttcctggctacaagtacctcggacccttcaacggactcgacaagggggagcccgtcaacgcggcggacgcggcggccctcgagcacgacaaggcctacgaccagcagctgcaggcgggtgacaatccgtacctgcggtataaccacgccgacgccgagtttcaggagcgtctgcaagaagatacgtcttttgggggcaacctcgggcgagcagtcttccaggccaagaagcgggttctcgaacctctcggtctggttgaggaaggcgctaagacggctcctggaaagaagagaccggtagagccatcaccccagcgttctccagactcctctacgggcatcggcaagaagggccaacagcccgccagaaaaagactcaattttggtcagactggcgactcagagtcagttccagaccctcaacctctcggagaacctccagcagcgccctctggtgtgggacctaatacaatggctgcaggcggtggcgcaccaatggcagacaataacgaaggcgccgacggagtgggtagttcctcgggaaattggcattgcgattccacatggctgggcgacagagtcatcaccaccagcacccgaacctgggccctgcccacctacaacaaccacctctacaagcaaatctccaacgggacatcgggaggagccaccaacgacaacacctacttcggctacagcaccccctgggggtattttgactttaacagattccactgccacttttcaccacgtgactggcagcgactcatcaacaacaactggggattccggcccaagagactcagcttcaagctcttcaacatccaggtcaaggaggtcacgcagaatgaaggcaccaaggccatcgccaataacctcaccagcaccatccaggtgtttacggactcggagtaccagctgccgtacgttctcggctctgcccaccagggctgcctgcctccgttcccggcggacgtgttcacgattccccagtacggctacctaacactcaacaacggtagtcaggccgtgggacgctcctccttctactgcctggaatactttccttcgcagatgctgagaaccggcaacaacttccagtttacttacaccttcgaggacgtgcctttccacagcagctacgcccacagccagagcttggaccggctgatgaatcctctgattgaccagtacctgtactacttgtctcggattcaaacaacaggaggcacggcaaatacgcagactctgggcttcagccaaggtgggcctaatacaatggccaatcaggcaaagaactggctgccaggaccctgttaccgccaacaacgcgtctcaacgacaaccgggcaaaacaacaatagcaactttgcctggactgctgggaccaaataccatctgaatggaagaaattcattggctaatcctggcatcgctatggcaacacacaaagacgacgaggagcgtttttttcccagtaacgggatcctgatttttggcaaacaaaatgctgccagagacaatgcggattacagcgatgtcatgcccaccagcgaggaagaaatcaaaaccactaaccctgtggccacagaggaatacggtatcgtggcagataacttgcagcagcaaaacacggctcctcaaattggaactgtcaacagccagggggccttacccggtatggtctggcagaaccgggacgtgtacctgcagggtcccatctgggccaagattcctcacacggacggcaacttccacccgtctccgctgatgggcggctttggcctgaaacatcctccgcctcagatcctgatcaagaacacgcctgtacctgcggatcctccgaccaccttcaaccagtcaaagctgaactctttcatcacgcaatacagcaccggacaggtcagcgtggaaattgaatgggagctgcagaaggaaaacagcaagcgctggaaccccgagatccagtacacctccaactactacaaatctacaagtgtggactttgctgttaatacagaaggcgtgtactctgaaccccgccccattggcacccgttacctcacccgtaatctgtaa

SEQ ID NO: 3851 - DNA, 2217 bp, Artificial Sequence
  source: /note="Description of Artificial Sequence: Synthetic polynucleotide"
atggctgccgatggttatcttccagattggctcgaggacaacctctctgagggcattcgcgagtggtgggcgctgaaacctggagccccgaagcccaaagccaaccagcaaaagcaggacgacggccggggtccggtgcttcctggctacaagtacctcggacccttcaacggactcgacaagggggagcccgtcaacgcggcggacgcggcggccctcgagcacgacaaggcctacgaccagcagctgcaggcgggtgacaatccgtacctgcggtataaccacgccgacgccgagtttcaggagcgtctgcaagaagatacgtcttttgggggcaacctcgggcgagcagtcttccaggccaagaagcgggttctcgaacctctcggtctggttgaggaaggcgctaagacggctcctggaaagaagagaccggtagagccatcaccccagcgttctccagactcctctacgggcatcggcaagaagggccaacagcccgccagaaaaagactcaattttggtcagactggcgactcagagtcagttccagaccctcaacctctcggagaacctccagcagcgccctctggtgtgggacctaatacaatggctgcaggcggtggcgcaccaatggcagacaataacgaaggcgccgacggagtgggtagttcctcgggaaattggcattgcgattccacatggctgggcgacagagtcatcaccaccagcacccgaacctgggccctgcccacctacaacaaccacctctacaagcaaatctccaacgggacatcgggaggagccaccaacgacaacacctacttcggctacagcaccccctgggggtattttgactttaacagattccactgccacttttcaccacgtgactggcagcgactcatcaacaacaactggggattccggcccaagagactcagcttcaagctcttcaacatccaggtcaaggaggtcacgcagaatgaaggcaccaagaccatcgccaataacctcaccagcaccatccaggtgtttacggactcggagtaccagctgccgtacgttctcggctctgcccaccagggctgcctgcctccgttcccggcggacgtgttcacgattccccagtacggctacctaacactcaacaacggtagtcaggccgtgggacgctcctccttctactgcctggaatactttccttcgcagatgctgagaaccggcaacaacttccagtttacttacaccttcgaggacgtgcctttccacagcagctacgcccacagccagagcttggaccggctgatgaatcctctgattgaccagtacctgtactacttgtctcggattcaaacaacaggaggcacggcaaatacgcagactctgggcttcagccaaggtgggcctaatacaatggccaatcaggcaaagaactggctgccaggaccctgttaccgccaacaacgcgtctcaacgacaaccgggcaaaacaacaatagcaactttgcctggactgctgggaccaaataccatctgaatggaagaaattcattggctaatcctggcatcgctatggcaacacacaaagacgacgaggagcgtttttttcccagtaacgggatcctgatttttggcaaacaaaatgctgccagagacaatgcggattacagcgatgtcatgcccaccagcgaggaagaaatcaaaaccactaaccctgtggccacagaggaatacggtatcgtggcagataacttgcagcagcaaaacacggctcctcaaattggaactgtcaacagccagggggccttacccggtatggtctggcagaaccgggacgtgtacctgcagggtcccatctgggccaagattcctcacacggacggcaacttccacccgtctccgctgatgggcggctttggcctgaaacatcctccgcctcagatcctgatcaagaacacgcctgtacctgcggatcctccgaccaccttcaaccagtcaaagctgaactctttcatcacgcaatacagcaccggacaggtcagcgtggaaattgaatgggagctgcagaaggaaaacagcaagcgctggaaccccgagatccagtacacctccaactactacaaatctacaagtgtggactttgctgttaatacagaaggcgtgtactctgaaccccgccccattggcacccgttacctcacccgtaatctgtaa

SEQ ID NO: 3852 - DNA, 2217 bp, Artificial Sequence
  source: /note="Description of Artificial Sequence: Synthetic polynucleotide"
atggctgccgatggttatcttccagattggctcgaggacaacctctctgagggcattcgcgagtggtgggcgctgaaacctggagccccgaagcccaaagccaaccagcaaaagcaggacgacggccggggtctggtgcttcctggctacaagtacctcggacccttcaacggactcgacaagggggagcccgtcaacgcggcggacgcggcggccctcgagcacgacaaggcctacgaccagcagctgcaggcgggtgacaatccgtacctgcggtataaccacgccgacgccgagtttcaggagcgtctgcaagaagatacgtcttttgggggcaacctcgggcgagcagtcttccaggccaagaagcgggttctcgaacctctcggtctggttgaggaaggcgctaagacggctcctggaaagaagagaccggtagagccatcaccccagcgttctccagactcctctacgggcatcggcaagaagggccaacagcccgccagaaaaagactcaattttggtcagactggcgactcagagtcagttccagaccctcaacctctcggagaacctccagcagcgccctctggtgtgggacctaatacaatggctgcaggcggtggcgcaccaatggcagacaataacgaaggcgccgacggagtgggtagttcctcgggaaattggcattgcgattccacatggctgggcgacagagtcatcaccaccagcacccgaacctgggccctgcccacctacaacaaccacctctacaagcaaatctccaacgggacatcgggaggagccaccaacgacaacacctacttcggctacagcaccccctgggggtattttgactttaacagattccactgccacttttcaccacgtgactggcagcgactcatcaacaacaactggggattccggcccaagagactcagcttcaagctcttcaacatccaggtcaaggaggtcacgcagaatgaaggcaccaagaccatcgccaataacctcaccagcaccatccaggtgtttacggactcggagtaccagctgccgtacgttctcggctctgcccaccagggctgcctgcctccgttcccggcggacgtgttcacgattccccagtacggctacctaacactcaacaacggtagtcaggccgtgggacgctcctccttctactgcctggaatactttccttcgcagatgctgagaaccggcaacaacttccagtttacttacaccttcgaggacgtgcctttccacagcagctacgcccacagccagagcttggaccggctgatgaatcctctgattgaccagtacctgtactacttgtctcggattcaaacaacaggaggcacggcaaatacgcagactctgggcttcagccaaggtgggcctaatacaatggccaatcgggcaaagaactggctgccaggaccctgttaccgccaacaacgcgtctcaacgacaaccgggcaaaacaacaatagcaactttgcctggactgctgggaccaaataccatctgaatggaagaaattcattggctaatcctggcatcgctatggcaacacacaaagacgacgaggagcgtttttttcccagtaacgggatcctgatttttggcaaacaaaatgctgccagagacaatgcggattacagcgatgtcatgcccaccagcgaggaagaaatcaaaaccactaaccctgtggccacagaggaatacggtatcgtggcagataacttgcagcagcaaaacacggctcctcaaattggaactgtcaacagccagggggccttacccggtatggtctggcagaaccgggacgtgtacctgcagggtcccatctgggccaagattcctcacacggacggcaacttccacccgtctccgctgatgggcggctttggcctgaaacatcctccgcctcagatcctgatcaagaacacgcctgtacctgcggatcctccgaccaccttcaaccagtcaaagctgaactctttcatcacgcaatacagcaccggacaggtcagcgtggaaattgaatgggagctgcagaaggaaaacagcaagcgctggaaccccgagatccagtacacctccaactactacaaatctacaagtgtggactttgctgttaatacagaaggcgtgtactctgaaccccgccccattggcacccgttacctcacccgtaatctgtaa

SEQ ID NO: 3853 - DNA, 2217 bp, Artificial Sequence
  source: /note="Description of Artificial Sequence: Synthetic polynucleotide"
atggctgccgatggttatcttccagattggctcgaggacaacctctctgagggcattcgcgagtggtgggcgctgaaacctggagccccgaagcccaaagccaaccagcaaaagcaggacgacggccggggtctggtgcttcctggctacaagtacctcggacccttcaacggactcgacaagggggagcccgtcaacgcggcggacgcggcggccctcgagcacgacaaggcctacgaccagcagctgcaggcgggtgacaatccgtacctgcggtataaccacgccgacgccgagtttcaggagcgtctgcaagaagatacgtcttttgggggcaacctcgggcgagcagtcttccaggccaagaagcgggttctcgaacctctcggtctggttgaggaaggcgctaagacggctcctggaaagaagagaccggtagagccatcaccccagcgttctccagactcctctacgggcatcggcaagaagggccaacagcccgccagaaaaagactcaattttggtcagactggcgactcagagtcagttccagaccctcaacctctcggagaacctccagcagcgccctctggtgtgggacctaatacaatggctgcaggcggtggcgcaccaatggcagacaataacgaaggcgccgacggagtgggtagttcctcgggaaattggcattgcgattccacatggctgggcgacagagtcatcaccaccagcacccgaacctgggccctgcccacctacaacaaccacctctacaagcaaatctccaacgggacatcgggaggagccaccaacgacaacacctacttcggctacagcaccccctgggggtattttgactttaacagattccactgccacttttcaccacgtgactggcagcgactcatcaacaacaactggggattccggcccaagagactcagcttcaagctcttcaacatccaggtcaaggaggtcacgcagaatgaaggcaccaagaccatcgccaataacctcaccagcaccatccaggtgtttacggactcggagtaccagctgccgtacgttctcggctctgcccaccagggctgcctgcctccgttcccggcggacgtgttcacgattccccagtacggctacctaacactcaacaacggtagtcaggccgtgggacgctcctccttctactgcctggaatactttccttcgcagatgctgagaaccggcaacaacttccagtttacttacaccttcgaggacgtgcctttccacagcagctacgcccacagccagagcttggaccggctgatgaatcctctgattgaccagtacctgtactacttgtctcggattcaaacaacaggaggcacggcaaatacgcagactctgggcttcagccaaggtgggcctaatacaatggccaatcaggcaaagaactggctgccaggaccctgttaccgccaacaacgcgtctcaacgacaaccgggcaaaacaacaatagcaactttgcccggactgctgggaccaaataccatctgaatggaagaaattcattggctaatcctggcatcgctatggcaacacacaaagacgacgaggagcgtttttttcccagtaacgggatcctgatttttggcaaacaaaatgctgccagagacaatgcggattacagcgatgtcatgcccaccagcgaggaagaaatcaaaaccactaaccctgtggccacagaggaatacggtatcgtggcagataacttgcagcagcaaaacacggctcctcaaattggaactgtcaacagccagggggccttacccggtatggtctggcagaaccgggacgtgtacctgcagggtcccatctgggccaagattcctcacacggacggcaacttccacccgtctccgctgatgggcggctttggcctgaaacatcctccgcctcagatcctgatcaagaacacgcctgtacctgcggatcctccgaccaccttcaaccagtcaaagctgaactctttcatcacgcaatacagcaccggacaggtcagcgtggaaattgaatgggagctgcagaaggaaaacagcaagcgctggaaccccgagatccagtacacctccaactactacaaatctacaagtgtggactttgctgttaatacagaaggcgtgtactctgaaccccgccccattggcacccgttacctcacccgtaatctgtaa

SEQ ID NO: 3854 - DNA, 2217 bp, Artificial Sequence
  source: /note="Description of Artificial Sequence: Synthetic polynucleotide"
atggctgccgatggttatcttccagattggctcgaggacaacctctctgagggcattcgcgagtggtgggcgctgaaacctggagccccgaagcccaaagccaaccagcaaaagcaggacgacggccggggtctggtgcttcctggctacaagtacctcggacccttcaacggactcgacaagggggagcccgtcaacgcggcggacgcggcggccctcgagcacgacaaggcctacgaccagcagctgcaggcgggtgacaatccgtacctgcggtataaccacgccgacgccgagtttcaggagcgtctgcaagaagatacgtcttttgggggcaacctcgggcgagcagtcttccaggccaagaagcgggttctcgaacctctcggtctggttgaggaaggcgctaagacggctcctggaaagaagagaccggtagagccatcaccccagcgttctccagactcctctacgggcatcggcaagaagggccaacagcccgccagaaaaagactcaattttggtcagactggcgactcagagtcagttccagaccctcaacctctcggagaacctccagcagcgccctctggtgtgggacctaatacaatggctgcaggcggtggcgcaccaatggcagacaataacgaaggcgccgacggagtgggtagttcctcgggaaattggcattgcgattccacatggctgggcgacagagtcatcaccaccagcacccgaacctgggccctgcccacctacaacaaccacctctacaagcaaatctccaacgggacatcgggaggagccaccaacgacaacacctacttcggctacagcaccccctgggggtattttgactttaacagatcccactgccacttttcaccacgtgactggcagcgactcatcaacaacaactggggattccggcccaagagactcagcttcaagctcttcaacatccaggtcaaggaggtcacgcagaatgaaggcaccaagaccatcgccaataacctcaccagcaccatccaggtgtttacggactcggagtaccagctgccgtacgttctcggctctgcccaccagggctgcctgcctccgttcccggcggacgtgttcacgattccccagtacggctacctaacactcaacaacggtagtcaggccgtgggacgctcctccttctactgcctggaatactttccttcgcagatgctgagaaccggcaacaacttccagtttacttacaccttcgaggacgtgcctttccacagcagctacgcccacagccagagcttggaccggctgatgaatcctctgattgaccagtacctgtactacttgtctcggattcaaacaacaggaggcacggcaaatacgcagactctgggcttcagccaaggtgggcctaatacaatggccaatcaggcaaagaactggctgccaggaccctgttaccgccaacaacgcgtctcaacgacaaccgggcaaaacaacaatagcaactttgcctggactgctgggaccaaataccatctgaatggaagaaattcattggctaatcctggcatcgctatggcaacacacaaagacgacgaggagcgtttttttcccagtaacgggatcctgatttttggcaaacaaaatgctgccagagacaatgcggattacagcgatgtcatgcccaccagcgaggaagaaatcaaaaccactaaccctgtggccacagaggaatacggtatcgtggcagataacttgcagcagcaaaacacggctcctcaaattggaactgtcaacagccagggggccttacccggtatggtctggcagaaccgggacgtgtacctgcagggtcccatctgggccaagattcctcacacggacggcaacttccacccgtctccgctgatgggcggctttggcctgaaacatcctccgcctcagatcctgatcaagaacacgcctgtacctgcggatcctccgaccaccttcaaccagtcaaagctgaactctttcatcacgcaatacagcaccggacaggtcagcgtggaaattgaatgggagctgcagaaggaaaacagcaagcgctggaaccccgagatccagtacacctccaactactacaaatctacaagtgtggactttgctgttaatacagaaggcgtgtactctgaaccccgccccattggcacccgttacctcacccgtaatctgtaa

SEQ ID NO: 3855 - DNA, 2217 bp, Artificial Sequence
  source: /note="Description of Artificial Sequence: Synthetic polynucleotide"
atggctgccgatggttatcttccagattggctcgaggacaacctctctgagggcattcgcgagtggtgggcgctgaaacctggagccccgaagcccaaagccaaccagcaaaagcaggacgacggccggggtctggtgcttcctggctacaagtacctcggacccttcaacggactcgacaagggggagcccgtcaacgcggcggacgcggcggccctcgagcacgacaaggcctacgaccagcagctgcaggcgggtgacaatccgtacctgcggtataaccacgccgacgccgagtttcaggagcgtctgcaagaagatacgtcttttgggggcaacctcgggcgagcagtcttccaggccaagaagcgggttctcgaacctctcggtctggttgaggaaggcgctaagacggctcctggaaagaagagaccggtagagccatcaccccagcgttctccagactcctctacgggcatcggcaagaagggccaacagcccgccagaaaaagactcaattttggtcagactggcgactcagagtcagttccagaccctcaacctctcggagaacctccagcagcgccctctggtgtgggacctaatacaatggctgcaggcggtggcgcaccaatggcagacaataacgaaggcgccgacggagtgggtagttcctcgggaaattggcattgcgattccacatggctgggcgacagagtcatcaccaccagcacccgaacctgggccctgcccacctacaacaaccacctctacaagcaaatctccaacgggacatcgggaggagccaccaacgacaacacctacttcggctacagcaccccctgggggtattttgactttaacagattccactgccacttttcaccacgtgactggcagcgactcatcaacaacaactggggattccggcccaagagactcagcttcaagctcttcaacatccaggtcaaggaggtcacgcagaatgaaggcaccaagaccatcgccaataacctcaccagcaccatccaggtgtttacggactcggagtaccagctgccgtacgttctcggctctgcccaccagggctgcctgcctccgttcccggcggacgtgttcacgattccccagtacggctacctaacactcaacaacggtagtcaggccgtgggacgctcctccttctactgcctggaatactttccttcgcagatgctgagaaccggcaacaacttccagtttacttacaccttcgaggacgtgcctttccacagcagctacgcccacagccagagcttggaccggctgatgaatcctctgattgaccagtacctgtactacttgtctcggattcaaacaacaggaggcacggcaaatacgcagactctgggcttcggccaaggtgggcctaatacaatggccaatcaggcaaagaactggctgccaggaccctgttaccgccaacaacgcgtctcaacgacaaccgggcaaaacaacaatagcaactttgcctggactgctgggaccaaataccatctgaatggaagaaattcattggctaatcctggcatcgctatggcaacacacaaagacgacgaggagcgtttttttcccagtaacgggatcctgatttttggcaaacaaaatgctgccagagacaatgcggattacagcgatgtcatgcccaccagcgaggaagaaatcaaaaccactaaccctgtggccacagaggaatacggtatcgtggcagataacttgcagcagcaaaacacggctcctcaaattggaactgtcaacagccagggggccttacccggtatggtctggcagaaccgggacgtgtacctgcagggtcccatctgggccaagattcctcacacggacggcaacttccacccgtctccgctgatgggcggctttggcctgaaacatcctccgcctcagatcctgatcaagaacacgcctgtacctgcggatcctccgaccaccttcaaccagtcaaagctgaactctttcatcacgcaatacagcaccggacaggtcagcgtggaaattgaatgggagctgcagaaggaaaacagcaagcgctggaaccccgagatccagtacacctccaactactacaaatctacaagtgtggactttgctgttaatacagaaggcgtgtactctgaaccccgccccattggcacccgttacctcacccgtaatctgtaa

SEQ ID NO: 3856 - DNA, 2217 bp, Artificial Sequence
  source: /note="Description of Artificial Sequence: Synthetic polynucleotide"
atggctgccgatggttatcttccagattggctcgaggacaacctctctgagggcattcgcgagtggtgggcgctgaaacctggagccccgaagcccaaagccaaccagcaaaagcaggacgacggccggggtctggtgcttcctggctacaagtacctcggacccttcaacggactcgacaagggggagcccgtcaacgcggcggacgcggcggccctcgagcacgacaaggcctacgaccagcagctgcaggcgggtgacaatccgtacctgcggtataaccacgccgacgccgagtttcaggagcgtctgcaagaagatacgtcttttgggggcaacctcgggcgagcagtcttccaggccaagaagcgggttctcgaacctctcggtctggttgaggaaggcgctaagacggctcctggaaagaagagaccggtagagccatcaccccagcgttctccagactcctctacgggcatcggcaagaagggccaacagcccgccagaaaaagactcaattttggtcagactggcgactcagagtcagttccagaccctcaacctctcggagaacctccagcagcgccctctggtgtgggacctaatacaatggctgcaggcggtggcgcaccaatggcagacaataacgaaggcgccgacggagtgggtagttcctcgggaaattggcattgcgattccacatggctgggcgacagagtcatcaccaccagcacccgaacctgggccctgcccacctacaacaaccacctctacaagcaaatctccaacgggacatcgggaggagccaccaacgacaacacctacttcggctacagcaccccctgggggtattttgactttaacagattccactgccacttttcaccacgtgactggcagcgactcatcaacaacaactggggattccggcccaagagactcagcttcaagctcttcaacatccaggtcaaggaggtcacgcagaatgaaggcaccaagaccatcgccaataacctcaccagcaccatccaggtgtttacggactcggagtaccagctgccgtacgttctcggctctgcccaccagggctgcctgcctccgttcccggcggacgtgttcacgattccccagtacggctacctaacactcaacaacggtagtcaggccgtgggacgctcctccttctactgcctggaatactttccttcgcagatgctgagaaccggcaacaacttccagtttacttacaccttcgaggacgtgcctttccacagcagctacgcccacagccagagcttggaccggctgatgaatcctctgattgaccagtacctgtactacttgtctcggattcaaacaacaggaggcacggcaaatacgcagactctgggcttcagccaaggtgggcctaatacaatggccaatcaggcaaagaactggctgccaggaccctgttaccgccaacaacgcgcctcaacgacaaccgggcaaaacaacaatagcaactttgcctggactgctgggaccaaataccatctgaatggaagaaattcattggctaatcctggcatcgctatggcaacacacaaagacgacgaggagcgtttttttcccagtaacgggatcctgatttttggcaaacaaaatgctgccagagacaatgcggattacagcgatgtcatgcccaccagcgaggaagaaatcaaaaccactaaccctgtggccacagaggaatacggtatcgtggcagataacttgcagcagcaaaacacggctcctcaaattggaactgtcaacagccagggggccttacccggtatggtctggcagaaccgggacgtgtacctgcagggtcccatctgggccaagattcctcacacggacggcaacttccacccgtctccgctgatgggcggctttggcctgaaacatcctccgcctcagatcctgatcaagaacacgcctgtacctgcggatcctccgaccaccttcaaccagtcaaagctgaactctttcatcacgcaatacagcaccggacaggtcagcgtggaaattgaatgggagctgcagaaggaaaacagcaagcgctggaaccccgagatccagtacacctccaactactacaaatctacaagtgtggactttgctgttaatacagaaggcgtgtactctgaaccccgccccattggcacccgttacctcacccgtaatctgtaa

SEQ ID NO: 3857 - DNA, 2217 bp, Artificial Sequence
  source: /note="Description of Artificial Sequence: Synthetic polynucleotide"
atggctgccgatggttatcttccagattggctcgaggacaacctctctgagggcattcgcgagtggtgggcgctgaaacctggagccccgaagcccaaagccaaccagcaaaagcaggacgacggccggggtctggtgcttcctggctacaagtacctcggacccttcaacggactcgacaagggggagcccgtcaacgcggcggacgcggcggccctcgagcacgacaaggcctacgaccagcagctgcaggcgggtgacaatccgtacctgcggtataaccacgccgacgccgagtttcaggagcgtctgcaagaagatacgtcttttgggggcaacctcgggcgagcagtcttccaggccaagaagcgggttctcgaacctctcggtctggttgaggaaggcgctaagacggctcctggaaagaagagaccggtagagccatcaccccagcgttctccagactcctctacgggcatcggcaagaagggccaacagcccgccagaaaaagactcaattttggtcagactggcgactcagagtcagttccagaccctcaacctctcggagaacctccagcagcgccctctggtgtgggacctaatacaatggctgcaggcggtggcgcaccaatggcagacaataacgaaggcgccgacggagtgggtagttcctcgggaaattggcattgcgattccacatggctgggcgacagagtcatcaccaccagcacccgaacctgggccctgcccacctacaacaaccacctctacaagcaaatctccaacgggacatcgggaggagccaccaacgacaacacctacttcggctacagcaccccctgggggtattttgactttaacagattccactgccacttttcaccacgtgactggcagcgactcatcaacaacaactggggattccggcccaagagactcagcttcaagctcttcaacatccaggtcaaggaggtcacgcagaatgaaggcaccaagaccatcgccaataacctcaccagcaccatccaggtgtttacggactcggagtaccagctgccgtacgttctcggctctgcccaccagggctgcctgcctccgttcccggcggacgtgttcacgattccccagtacggctacctaacactcaacaacggtagtcaggccgtgggacgctcctccttctactgcctggaatactttccttcgcagatgctgagaaccggcaacaacttccagtttacttacaccttcgaggacgtgcctttccacagcagctacgcccacagccagagcttggaccggctgatgaatcctctgattgaccagtacctgtactacttgtctcggattcaaacaacaggaggcacggcaaatacgcagactctgggcttcagccaaggtgggcctaatacaatggccaatcaggcaaagaactggctgccaggaccctgttaccgccaacaacgcgtctcaacgacaaccgggcaaaacaacaatagcaactttgcctggactgctgggaccaaataccatctgaatggaagaaattcattggctaatcctggcatcgctatggcaacacacaaagacgacgaggagcgtttttttcccagtaacgggatcctgatttttggcaaacaaaatgctgccagagacaatgcggattacagcgatgtcatacccaccagcgaggaagaaatcaaaaccactaaccctgtggccacagaggaatacggtatcgtggcagataacttgcagcagcaaaacacggctcctcaaattggaactgtcaacagccagggggccttacccggtatggtctggcagaaccgggacgtgtacctgcagggtcccatctgggccaagattcctcacacggacggcaacttccacccgtctccgctgatgggcggctttggcctgaaacatcctccgcctcagatcctgatcaagaacacgcctgtacctgcggatcctccgaccaccttcaaccagtcaaagctgaactctttcatcacgcaatacagcaccggacaggtcagcgtggaaattgaatgggagctgcagaaggaaaacagcaagcgctggaaccccgagatccagtacacctccaactactacaaatctacaagtgtggactttgctgttaatacagaaggcgtgtactctgaaccccgccccattggcacccgttacctcacccgtaatctgtaa

SEQ ID NO: 3858 - DNA, 2217 bp, Artificial Sequence
  source: /note="Description of Artificial Sequence: Synthetic polynucleotide"
atggctgccgatggttatcttccagattggctcgaggacaacctctctgagggcattcgcgagtggtgggcgctgaaacctggagccccgaagcccaaagccaaccagcaaaagcaggacgacggccggggtctggtgcttcctggctacaagtacctcggacccttcaacggactcgacaagggggagcccgtcaacgcggcggacgcggcggccctcgagcacgacaaggcctacgaccagcagctgcaggcgggtgacaatccgtacctgcggtataaccacgccgacgccgagtttcaggagcgtctgcaagaagatacgtcttttgggggcaacctcgggcgagcagtcttccaggccaagaagcgggttctcgaacctctcggtctggttgaggaaggcgctaagacggctcctggaaagaagagaccggtagagccatcaccccagcgttctccagactcctctacgggcatcggcaagaagggccaacagcccgccagaaaaagactcaattttggtcagactggcgactcagagtcagttccagaccctcaacctctcggagaacctccagcagcgccctctggtgtgggacctaatacaatggctgcaggcggtggcgcaccaatggcagacaataacgaaggcgccgacggagtgggtagttcctcgggaaattggcattgcgattccacatggctgggcgacagagtcatcaccaccagcacccgaacctgggccctgcccacctacaacaaccacctctacaagcaaatctccaacgggacatcgggaggagccaccaacgacaacacctacttcggctacagcaccccctgggggtattttgactttaacagattccactgccacttttcaccacgtgactggcagcgactcatcaacaacaactggggattccggcccaagagactcagcttcaagctcttcaacatccaggtcaaggaggtcacgcagaatgaaggcaccaagaccatcgccaataacctcaccagcaccatccaggtgtttacggactcggagtaccagctgccgtacgttctcggctctgcccaccagggctgcctgcctccgttcccggcggacgtgttcacgattccccagtacggctacctaacactcaacaacggtagtcaggccgtgggacgctcctccttctactgcctggaatactttccttcgcagatgctgagaaccggcaacaacttccagtttacttacaccttcgaggacgtgcctttccacagcagctacgcccacagccagagcttggaccggctgatgaatcctctgattgaccagtacctgtactacttgtctcggattcaaacaacaggaggcacggcaaatacgcagactctgggcttcagccaaggtgggcctaatacaatggccaatcaggcaaagaactggctgccaggaccctgttaccgccaacaacgcgtctcaacgacaaccgggcaaaacaacaatagcaactttgcctggactgctgggaccaaataccatctgaatggaagaaattcattggctaatcctggcatcgctatggcaacacacaaagacgacgaggagcgtttttttcccagtaacgggatcctgatttttggcaaacaaaatgctgccagagacaatgcggattacagcgatgtcatgcccaccagcgaggaagaaatcaaaaccactaaccctgtggccacagaggaatacggtatcgtggcagataacttgcagcagcaaaacacggctcctcaaattggaactgccaacagccagggggccttacccggtatggtctggcagaaccgggacgtgtacctgcagggtcccatctgggccaagattcctcacacggacggcaacttccacccgtctccgctgatgggcggctttggcctgaaacatcctccgcctcagatcctgatcaagaacacgcctgtacctgcggatcctccgaccaccttcaaccagtcaaagctgaactctttcatcacgcaatacagcaccggacaggtcagcgtggaaattgaatgggagctgcagaaggaaaacagcaagcgctggaaccccgagatccagtacacctccaactactacaaatctacaagtgtggactttgctgttaatacagaaggcgtgtactctgaaccccgccccattggcacccgttacctcacccgtaatctgtaa

SEQ ID NO: 3859 - DNA, 2217 bp, Artificial Sequence
  source: /note="Description of Artificial Sequence: Synthetic polynucleotide"
atggctgccgatggttatcttccagattggctcgaggacaacctctctgagggcattcgcgagtggtgggcgctgaaacctggagccccgaagcccaaagccaaccagcaaaagcaggacgacggccggggtctggtgcttcctggctacaagtacctcggacccttcaacggactcgacaagggggagcccgtcaacgcggcggacgcggcggccctcgagcacgacaaggcctacgaccagcagctgcaggcgggtgacaatccgtacctgcggtataaccacgccgacgccgagtttcaggagcgtctgcaagaagatacgtcttttgggggcaacctcgggcgagcagtcttccaggccaagaagcgggttctcgaacctctcggtctggttgaggaaggcgctaagacggctcctggaaagaagagaccggtagagccatcaccccagcgttctccagactcctctacgggcatcggcaagaagggccaacagcccgccagaaaaagactcaattttggtcagactggcgactcagagtcagttccagaccctcaacctctcggagaacctccagcagcgccctctggtgtgggacctaatacaatggctgcaggcggtggcgcaccaatggcagacaataacgaaggcgccgacggagtgggtagttcctcgggaaattggcattgcgattccacatggctgggcgacagagtcatcaccaccagcacccgaacctgggccctgcccacctacaacaaccacctctacaagcaaatctccaacgggacatcgggaggagccaccaacgacaacacctacttcggctacagcaccccctgggggtattttgactttaacagattccactgccacttttcaccacgtgactggcagcgactcatcaacaacaactggggattccggcccaagagactcagcttcaagctcttcaacatccaggtcaaggaggtcacgcagaatgaaggcaccaagaccatcgccaataacctcaccagcaccatccaggtgtttacggactcggagtaccagctgccgtacgttctcggctctgcccaccagggctgcctgcctccgttcccggcggacgtgttcacgattccccagtacggctacctaacactcaacaacggtagtcaggccgtgggacgctcctccttctactgcctggaatactttccttcgcagatgctgagaaccggcaacaacttccagtttacttacaccttcgaggacgtgcctttccacagcagctacgcccacagccagagcttggaccggctgatgaatcctctgattgaccagtacctgtactacttgtctcggattcaaacaacaggaggcacggcaaatacgcagactctgggcttcagccaaggtgggcctaatacaatggccaatcaggcaaagaactggctgccaggaccctgttaccgccaacaacgcgtctcaacgacaaccgggcaaaacaacaatagcaactttgcctggactgctgggaccaaataccatctgaatggaagaaattcattggctaatcctggcatcgctatggcaacacacaaagacgacgaggagcgtttttttcccagtaacgggatcctgatttttggcaaacaaaatgctgccagagacaatgcggattacagcgatgtcatgcccaccagcgaggaagaaatcaaaaccactaaccctgtggccacagaggaatacggtatcgtggcagataacttgcagcagcaaaacacggctcctcaaattggaactgtcaacagccagggggccttacccggtatggtctggcagaaccgggacgtgtacctgcagggtcccatctgggccaagattcctcacacggacggcaacttccacccgtctccgctgatgggcggctttggcctgaaacatcctccgcctcagatcctgatcaagaacacgcctgtacctgcggatcctccgaccaccttcaaccagtcaaagctgaactctttcatcacgcaatacagcaccggacaggtcggcgtggaaattgaatgggagctgcagaaggaaaacagcaagcgctggaaccccgagatccagtacacctccaactactacaaatctacaagtgtggactttgctgttaatacagaaggcgtgtactctgaaccccgccccattggcacccgttacctcacccgtaatctgtaa

SEQ ID NO: 3860 - DNA, 2217 bp, Artificial Sequence
  source: /note="Description of Artificial Sequence: Synthetic polynucleotide"
atggctgccgatggttatcttccagattggctcgaggacaacctctctgagggcattcgcgagtggtgggcgctgaaacctggagccccgaagcccaaagccaaccagcaaaagcaggacgacggccggggtctggtgcttcctggctacaagtacctcggacccttcaacggactcgacaagggggagcccgtcaacgcggcggacgcggcggccctcgagcacggcaaggcctacgaccagcagctgcaggcgggtgacaatccgtacctgcggtataaccacgccgacgccgagtttcaggagcgtctgcaagaagatacgtcttttgggggcaacctcgggcgagcagtcttccaggccaagaagcgggttctcgaacctctcggtctggttgaggaaggcgctaagacggctcctggaaagaagagaccggtagagccatcaccccagcgttctccagactcctctacgggcatcggcaagaagggccaacagcccgccagaaaaagactcaattttggtcagactggcgactcagagtcagttccagaccctcaacctctcggagaacctccagcagcgccctctggtgtgggacctaatacaatggctgcaggcggtggcgcaccaatggcagacaataacgaaggcgccgacggagtgggtagttcctcgggaaattggcattgcgattccacatggctgggcgacagagtcatcaccaccagcacccgaacctgggccctgcccacctacaacaaccacctctacaagcaaatctccaacgggacatcgggaggagccaccaacgacaacacctacttcggctacagcaccccctgggggtattttgactttaacagattccactgccacttttcaccacgtgactggcagcgactcatcaacaacaactggggattccggcccaagagactcagcttcaagctcttcaacatccaggtcaaggaggtcacgcagaatgaaggcaccaagaccatcgccaataacctcaccagcaccatccaggtgtttacggactcggagtaccagctgccgtacgttctcggctctgcccaccagggctgcctgcctccgttcccggcggacgtgttcacgattccccagtacggctacctaacactcaacaacggtagtcaggccgtgggacgctcctccttctactgcctggaatactttccttcgcagatgctgagaaccggcaacaacttccagtttacttacaccttcgaggacgtgcctttccacagcagctacgcccacagccagagcttggaccggctgatgaatcctctgattgaccagtacctgtactacttgtctcggattcaaacaacaggaggcacggcaaatacgcagactctgggcttcagccaaggtgggcctaatacaatggccaatcaggcaaagaactggctgccaggaccctgttaccgccaacaacgcgtctcaacgacaaccgggcaaaacaacaatagcaactttgcctggactgctgggaccaaataccatctgaatggaagaaattcattggctaatcctggcatcgctatggcaacacacaaagacgacgaggagcgtttttttcccagtaacgggatcctgatttttggcaaacaaaatgctgccagagacaatgcggattacagcgatgtcatgcccaccagcgaggaagaaatcaaaaccactaaccctgtggccacagaggaatacggtatcgtggcagataacttgcagcagcaaaacacggctcctcaaattggaactgtcaacagccagggggccttacccggtatggtctggcagaaccgggacgtgtacctgcagggtcccatctgggccaagattcctcacacggacggcaacttccacccgtctccgctgatgggcggctttggcctgaaacatcctccgcctcagatcctgatcaagaacacgcctgtacctgcggatcctccgaccaccttcaaccagtcaaagctgaactctttcatcacgcaatacagcaccggacaggtcagcgtggaaattgaatgggagctgcagaaggaaaacagcaagcgctggaaccccgagatccagtacacctccaactactacaaatctacaagtgtggactttgctgttaatacagaaggcgtgtactctgaaccccgccccattggcacccgttacctcacccgtaatctgtaa

SEQ ID NO: 3861 - DNA, 2217 bp, Artificial Sequence
  source: /note="Description of Artificial Sequence: Synthetic polynucleotide"
atggctgccgatggttatcttccagattggctcgaggacaacctctctgagggcattcgcgagtggtgggcgctgaaacctggagccccgaagcccaaagccaaccagcaaaagcaggacgacggccggggtctggtgcttcctggctacaagtacctcggacccttcaacggactcgacaagggggagcccgtcaacgcggcggacgcggcggccctcgagcacgacaaggcctacgaccagcagctgcaggcgggtgacaatccgtacctgcggtataaccacgccgacgccgagtttcaggagcgtctgcaagaagatacgtcttttgggggcaacctcgggcgagcagtcttccaggccaagaagcgggttctcgaacctctcggtctggttgaggaaggcgctaagacggctcctggaaagaagagaccggtagagccatcaccccagcgttctccagactcctctacgggcatcggcaagaagggccaacagcccgccagaaaaagactcaattttggtcagactggcgactcagagtcagttccagaccctcaacctctcggagaacctccagcagcgccctctggtgtgggacctaatacaatggctgcaggcggtggcgcaccaatggcagacaataacgaaggcgccgacggagtgggtagttcctcgggaaattggcattgcgattccacatggctgggcgacagagtcatcaccaccagcacccgaacctgggccctgcccacctacaacaaccacctctacaagcaaatctccaacgggacatcgggaggagccaccaacgacaacacctacttcggctacagcaccccctgggggtattttgactttaacagattccactgccacttttcaccacgtgactggcagcgactcatcaacaacaactggggattccggcccaagagactcagcttcaagctcttcaacatccaggtcaaggaggtcacgcagaatgaaggcaccaagaccatcgccaataacctcaccagcaccatccaggtgtttacggactcggagtaccagctgccgtacgttctcggctctgcccaccagggctgcctgcctccgttcccggcggacgtgttcacgattccccagtacggctacctaacactcaacaacggtagtcaggccgtgggacgctcctccttctactgcctggaatactttccttcgcagatgctgagaaccggcaacaacttccagtttacttacaccttcgaggacgtgcctttccacagcagctacgcccacagccagagcttggaccggctgatgaatcctctgattgaccagtacctgtactacttgtctcggattcaaacaacaggaggcacggcaaatacgcagactctgggcttcagccaaggtgggcctaatacaatggccaatcaggcaaagaactggctgccaggaccctgttaccgccaacaacgcgtctcaacgacaaccgggcaaaacaacaatagcaactttgcctggactgctgggaccaaataccatctgaatggaagaaattcattggctaatcctggcatcgctatggcaacacacaaagacgacgaggagcgtttttttcccagtaacgggatcctgatttttggcaaacaaaatgctgccagagacaatgcggattacagcgatgtcatgcccaccagcgaggaagaaatcaaaaccactaaccctgtggccacaggggaatacggtatcgtggcagataacttgcagcagcaaaacacggctcctcaaattggaactgtcaacagccagggggccttacccggtatggtctggcagaaccgggacgtgtacctgcagggtcccatctgggccaagattcctcacacggacggcaacttccacccgtctccgctgatgggcggctttggcctgaaacatcctccgcctcagatcctgatcaagaacacgcctgtacctgcggatcctccgaccaccttcaaccagtcaaagctgaactctttcatcacgcaatacagcaccggacaggtcagcgtggaaattgaatgggagctgcagaaggaaaacagcaagcgctggaaccccgagatccagtacacctccaactactacaaatctacaagtgtggactttgctgttaatacagaaggcgtgtactctgaaccccgccccattggcacccgttacctcacccgtaatctgtaa

SEQ ID NO: 3862 - DNA, 2217 bp, Artificial Sequence
  source: /note="Description of Artificial Sequence: Synthetic polynucleotide"
atggctgccgatggttatcttccagattggctcgaggacaacctctctgagggcattcgcgagtggtgggcgctgaaacctggagccccgaagcccaaagccaaccagcaaaagcaggacgacggccggggtctggtgcttcctggctacaagtacctcggacccttcaacggactcgacaagggggagcccgtcaacgcggcggacgcggcggccctcgagcacgacaaggcctacgaccagcagctgcaggcgggtgacaatccgtacctgcggtataaccacgccgacgccgagtttcaggagcgtctgcaagaagatacgtcttttgggggcaacctcgggcgagcagtcttccaggccaagaagcgggttctcgaacctctcggtctggttgaggaaggcgctaagacggctcctggaaagaagagaccggtagagccatcaccccagcgttctccagactcctctacgggcatcggcaagaagggccaacagcccgccagaaaaagactcaattttggtcagactggcgactcagagtcagttccagaccctcaacctctcggagaacctccagcagcgccctctggtgtgggacctaatacaatggctgcaggcggtggcgcaccaatggcagacaataacgaaggcgccgacggagtgggtagttcctcgggaaattggcattgcgattccacatggctgggcgacagagtcatcaccaccagcacccgaacctgggccctgcccacccacaacaaccacctctacaagcaaatctccaacgggacatcgggaggagccaccaacgacaacacctacttcggctacagcaccccctgggggtattttgactttaacagattccactgccacttttcaccacgtgactggcagcgactcatcaacaacaactggggattccggcccaagagactcagcttcaagctcttcaacatccaggtcaaggaggtcacgcagaatgaaggcaccaagaccatcgccaataacctcaccagcaccatccaggtgtttacggactcggagtaccagctgccgtacgttctcggctctgcccaccagggctgcctgcctccgttcccggcggacgtgttcacgattccccagtacggctacctaacactcaacaacggtagtcaggccgtgggacgctcctccttctactgcctggaatactttccttcgcagatgctgagaaccggcaacaacttccagtttacttacaccttcgaggacgtgcctttccacagcagctacgcccacagccagagcttggaccggctgatgaatcctctgattgaccagtacctgtactacttgtctcggattcaaacaacaggaggcacggcaaatacgcagactctgggcttcagccaaggtgggcctaatacaatggccaatcaggcaaagaactggctgccaggaccctgttaccgccaacaacgcgtctcaacgacaaccgggcaaaacaacaatagcaactttgcctggactgctgggaccaaataccatctgaatggaagaaattcattggctaatcctggcatcgctatggcaacacacaaagacgacgaggagcgtttttttcccagtaacgggatcctgatttttggcaaacaaaatgctgccagagacaatgcggattacagcgatgtcatgcccaccagcgaggaagaaatcaaaaccactaaccctgtggccacagaggaatacggtatcgtggcagataacttgcagcagcaaaacacggctcctcaaattggaactgtcaacagccagggggccttacccggtatggtctggcagaaccgggacgtgtacctgcagggtcccatctgggccaagattcctcacacggacggcaacttccacccgtctccgctgatgggcggctttggcctgaaacatcctccgcctcagatcctgatcaagaacacgcctgtacctgcggatcctccgaccaccttcaaccagtcaaagctgaactctttcatcacgcaatacagcaccggacaggtcagcgtggaaattgaatgggagctgcagaaggaaaacagcaagcgctggaaccccgagatccagtacacctccaactactacaaatctacaagtgtggactttgctgttaatacagaaggcgtgtactctgaaccccgccccattggcacccgttacctcacccgtaatctgtaa

SEQ ID NO: 3863 - DNA, 2217 bp, Artificial Sequence
  source: /note="Description of Artificial Sequence: Synthetic polynucleotide"
atggctgccgatggttatcttccagattggctcgaggacaacctctctgagggcattcgcgagtggtgggcgctgaaacctggagccccgaagcccaaagccaaccagcaaaagcaggacgacggccggggtctggtgcttcctggctacaagtacctcggacccttcaacggactcgacaagggggagcccgtcaacgcggcggacgcggcggccctcgagcacgacaaggcctacgaccagcagctgcaggcgggtgacaatccgtacctgcggtataaccacgccgacgccgagtttcaggagcgtctgcaagaagatacgtcttttgggggcaacctcgggcgagcagtcttccaggccaagaagcgggttctcgaacctctcggtctggttgaggaaggcgctaagacggctcctggaaagaagagaccggtagagccatcaccccagcgttctccagactcctctacgggcatcggcaagaagggccaacagcccgccagaaaaagactcaattttggtcagactggcgactcagagtcagttccagaccctcaacctctcggagaacctccagcagcgccctctggtgtgggacctaatacaatggctgcaggcggtggcgcaccaatggcagacaataacgaaggcgccgacggagtgggtagttcctcgggaaattggcattgcgattccacatggctgggcgacagagtcatcaccaccagcacccgaacctgggccctgcccacctacaacaaccacctctacaagcaaatctccaacgggacatcgggaggagccaccaacgacaacacctacttcggctacagcaccccctgggggtattttgactttaacagattccactgccacttttcaccacgtgactggcagcgactcatcaacaacaactggggattccggcccaagagactcagcttcaagctcttcaacatccaggtcaaggaggtcacgcagaatgaaggcaccaagaccatcgccaataacctcaccagcaccatccaggtgtttacggactcggagtaccagctgccgtacgttctcggctctgcccaccagggctgcctgcctccgttcccggcggacgtgttcacgattccccagtacggctacctaacactcaacaacggtagtcaggccgtgggacgctcctccttctactgcctggaatactttccttcgcagatgctgagaaccggcaacaacttccagtttacttacaccttcgaggacgtgcctttccacagcagctacgcccacagccagagcttggaccggctgatgaatcctctgattgaccagtacctgtactacttgtctcggattcaaacaacaggaggcacggcaaatacgcagactctgggcttcagccaaggtgggcctaatacaatggccaatcaggcaaagaactggctgccaggaccctgttaccgccaacaacgcgtctcaacgacaaccgggcaaaacaacaatagcaactttgcctggactgctgggaccaaataccatctgaatggaagaaattcattggctaatcctggcatcgctatggcaacacacaaagacgacgaggagcgtttttttcccagtaacgggatcctgatttttggcaaacaaaatgctgccatagacaatgcggattacagcgatgtcatgcccaccagcgaggaagaaatcaaaaccactaaccctgtggccacagaggaatacggtatcgtggcagataacttgcagcagcaaaacacggctcctcaaattggaactgtcaacagccagggggccttacccggtatggtctggcagaaccgggacgtgtacctgcagggtcccatctgggccaagattcctcacacggacggcaacttccacccgtctccgctgatgggcggctttggcctgaaacatcctccgcctcagatcctgatcaagaacacgcctgtacctgcggatcctccgaccaccttcaaccagtcaaagctgaactctttcatcacgcaatacagcaccggacaggtcagcgtggaaattgaatgggagctgcagaaggaaaacagcaagcgctggaaccccgagatccagtacacctccaactactacaaatctacaagtgtggactttgctgttaatacagaaggcgtgtactctgaaccccgccccattggcacccgttacctcacccgtaatctgtaa

SEQ ID NO: 3864 - DNA, 2217 bp, Artificial Sequence
  source: /note="Description of Artificial Sequence: Synthetic polynucleotide"
atggctgccgatggttatcttccagattggctcgaggacaacctctctgagggcattcgcgagtggtgggcgctgaaacctggagccccgaagcccaaagccaaccagcaaaagcaggacgacggccggggtctggtgcttcctggctacaagtacctcggacccttcaacggactcgacaagggggagcccgtcaacgcggcggacgcggcggccctcgagcacgacaaggcctacgaccagcagctgcaggcgggtgacaatccgtacctgcggtataaccacgccgacgccgagtttcaggagcgtctgcaagaagatacgtcttttgggggcaacctcgggcgagcagtcttccaggccaagaagcgggttctcgaacctctcggtctggttgaggaaggcgctaagacggctcctggaaagaagagaccggtagagccatcaccccagcgttctccagactcctctacgggcatcggcaagaagggccaacagcccgccagaaaaagactcaattttggtcagactggcgactcagagtcagttccagaccctcaacctctcggagaacctccagcagcgccctctggtgtgggacctaatacaatggctgcaggcggtggcgcaccaatggcagacaataacgaaggcgccgacggagtgggtagttcctcgggaaattggcattgcgattccacatggctgggcgacagagtcatcaccaccagcacccgaacctgggccctgcccacctacaacaaccacctctacaagcaaatctccaacgggacatcgggaggagccaccaacgacaacacctacttcggctacagcaccccctgggggtattttgactttaacagattccactgccacttttcaccacgtgactggcagcgactcatcaacaacaactggggattccggcccaagagactcagcttcaagctcttcaacatccaggtcaaggaggtcacgcagaatgaaggcaccaagaccatcgccaataacctcaccagcaccatccaggtgtttacggactcggagtaccagctgccgtacgttctcggctctgcccaccagggctgcctgcctccgttcccggcggacgtgttcacgattccccagtacggctacctaacactcaacaacggtagtcaggccgtgggacgctcctccttctactgcctggaatactttccttcgcagatgctgagaaccggcaacaacttccagtttacttacaccttcgaggacgtgcctttccacagcagctacgcccacagccagagcttggaccggctgatgaatcctctgattgaccagtacctgtactacttgtctcggattcaaacaacaggaggcacggcaaatacgcagactctgggcttcagccaaggtgggcctaatacaatggccaatcaggcaaagaactggctgccaggaccctgttaccgccaacaacgcgtctcaacgacaaccgggcaaaacaacaatagcaactttgcctggactgctgggaccaaataccatctgaatggaagaaattcattggctaatcctggcatcgctatggcaacacacaaagacgacgaggggcgtttttttcccagtaacgggatcctgatttttggcaaacaaaatgctgccagagacaatgcggattacagcgatgtcatgcccaccagcgaggaagaaatcaaaaccactaaccctgtggccacagaggaatacggtatcgtggcagataacttgcagcagcaaaacacggctcctcaaattggaactgtcaacagccagggggccttacccggtatggtctggcagaaccgggacgtgtacctgcagggtcccatctgggccaagattcctcacacggacggcaacttccacccgtctccgctgatgggcggctttggcctgaaacatcctccgcctcagatcctgatcaagaacacgcctgtacctgcggatcctccgaccaccttcaaccagtcaaagctgaactctttcatcacgcaatacagcaccggacaggtcagcgtggaaattgaatgggagctgcagaaggaaaacagcaagcgctggaaccccgagatccagtacacctccaactactacaaatctacaagtgtggactttgctgttaatacagaaggcgtgtactctgaaccccgccccattggcacccgttacctcacccgtaatctgtaa

SEQ ID NO: 3865 - DNA, 2217 bp, Artificial Sequence
  source: /note="Description of Artificial Sequence: Synthetic polynucleotide"
atggctgccgatggttatcttccagattggctcgaggacaacctctctgagggcattcgcgagtggtgggcgctgaaacctggagccccgaagcccaaagccaaccagcaaaagcaggacgacggccggggtctggtgcttcctggctacaagtacctcggacccttcaacggactcgacaagggggagcccgtcaacgcggcggacgcggcggccctcgagcacgacaaggcctacgaccagcagctgcaggcgggtgacaatccgtacctgcggtataaccacgccgacgccgagtttcaggagcgtctgcaagaagatacgtcttttgggggcaacctcgggcgagcagtcttccaggccaagaagcgggttctcgaacctctcggtctggttgaggaaggcgctaagacggctcctggaaagaagagaccggtagagccatcaccccagcgttctccagactcctctacgggcatcggcaagaagggccaacagcccgccagaaaaagactcaattttggtcagactggcgactcagagtcagttccagaccctcaacctctcggagaacctccagcagcgccctctggtgtgggacctaatacaatggctgcaggcggtggcgcaccaatggcagacaataacgaaggcgccgacggagtgggtagttcctcgggaaattggcattgcgattccacatggctgggcgacagagtcatcaccaccagcacccgaacctgggccctgcccacctacaacaaccacctctacaagcaaatctccaacgggacatcgggaggagccaccaacgacaacacctacttcggctacagcaccccctgggggtattttgactttaacagattccactgccacttttcaccacgtgactggcagcgactcatcaacaacaactggggattccggaccaagagactcagcttcaagctcttcaacatccaggtcaaggaggtcacgcagaatgaaggcaccaagaccatcgccaataacctcaccagcaccatccaggtgtttacggactcggagtaccagctgccgtacgttctcggctctgcccaccagggctgcctgcctccgttcccggcggacgtgttcacgattccccagtacggctacctaacactcaacaacggtagtcaggccgtgggacgctcctccttctactgcctggaatactttccttcgcagatgctgagaaccggcaacaacttccagtttacttacaccttcgaggacgtgcctttccacagcagctacgcccacagccagagcttggaccggctgatgaatcctctgattgaccagtacctgtactacttgtctcggattcaaacaacaggaggcacggcaaatacgcagactctgggcttcagccaaggtgggcctaatacaatggccaatcaggcaaagaactggctgccaggaccctgttaccgccaacaacgcgtctcaacgacaaccgggcaaaacaacaatagcaactttgcctggactgctgggaccaaataccatctgaatggaagaaattcattggctaatcctggcatcgctatggcaacacacaaagacgacgaggagcgtttttttcccagtaacgggatcctgatttttggcaaacaaaatgctgccagagacaatgcggattacagcgatgtcatgcccaccagcgaggaagaaatcaaaaccactaaccctgtggccacagaggaatacggtatcgtggcagataacttgcagcagcaaaacacggctcctcaaattggaactgtcaacagccagggggccttacccggtatggtctggcagaaccgggacgtgtacctgcagggtcccatctgggccaagattcctcacacggacggcaacttccacccgtctccgctgatgggcggctttggcctgaaacatcctccgcctcagatcctgatcaagaacacgcctgtacctgcggatcctccgaccaccttcaaccagtcaaagctgaactctttcatcacgcaatacagcaccggacaggtcagcgtggaaattgaatgggagctgcagaaggaaaacagcaagcgctggaaccccgagatccagtacacctccaactactacaaatctacaagtgtggactttgctgttaatacagaaggcgtgtactctgaaccccgccccattggcacccgttacctcacccgtaatctgtaa

SEQ ID NO: 3866 - DNA, 2217 bp, Artificial Sequence
  source: /note="Description of Artificial Sequence: Synthetic polynucleotide"
atggctgccgatggttatcttccagattggctcgaggacaacctctctgagggcattcgcgagtggtgggcgctgaaacctggagccccgaagcccaaagccaaccagcaaaagcaggacgacggccggggtctggtgcttcctggctacaagtacctcggacccttcaacggactcgacaagggggagcccgtcaacgcggcggacgcggcggccctcgagcacgacaaggcctacgaccagcagctgcaggcgggtgacaatccgtacctgcggtataaccacgccgacgccgagtttcaggagcgtctgcaagaagatacgtcttttgggggcaacctcgggcgagcagtcttccaggccaagaagcgggttctcgaacctctcggtctggttgaggaaggcgctaagacggctcctggaaagaagagaccggtagagccatcaccccagcgttctccagactcctctacgggcatcggcaagaagggccaacagcccgccagaaaaagactcaattttggtcagactggcgactcagagtcagttccagaccctcaacctctcggagaacctccagcagcgccctctggtgtgggacctaatacaatggctgcaggcggtggcgcaccaatggcagacaataacgaaggcgccgacggagtgggtagttcctcgggaaattggcattgcgattccacatggctgggcgacagagtcatcaccaccagcacccgaacctgggccctgcccacctacaacaaccacctctacaagcaaatctccaacgggacatcgggaggagccaccaacgacaacacctacttcggctacagcaccccctgggggtattttgactttaacagattccactgccacttttcaccacgtgactggcagcgactcatcaacaacaactggggattccggcccaagagactcagcttcaagctcttcaacatccaggtcaaggaggtcacgcagaatgaaggcaccaagaccatcgccaataacctcaccagcaccatccaggtgtttacggactcggagtaccagctgccgtacgttctcggctctgcccaccagggctgcctgcctccgttcccggcggacgtgttcacgattccccagtacggctacctaacactcaacaacggtagtcaggccgtgggacgctcctccttctactgcctggaatactttccttcgcagatgctgagaaccggcaacaacttccagtttacttacaccttcgaggacgtgcctttccacagcagctacgcccacagccagagcttggaccggctgatgaatcctctgattgaccagtacctgtactacttgtctcggattcaaacaacaggaggcacggcaaatacgcagactctgggcttcagccaaggtgggcctaatacaatggccaatcaggcaaagaactggctgccaggaccctgttaccgccaacaacgcgtctcaacgacaaccgggcaaaacaacaatagcaactttgcctggactgctgggaccaaataccatctgaatggaagaaattcattggctaatcctggcatcgctatggcaacacacaaagacgacgaggagcgtttttttcccagtaacgggatcctgatttttggcaaacaaaatgctgccagagacaatgcggattacagcgatgtcatgcccaccagcgaggaagaaatcaaaaccactaaccctgtggccacagaggaatacggtatcgtggcagataacttgcagcagcaaaacacggctcctcaaattggaactgtcaacagccagggggccttacccggtatggtctggcagaaccgggacgtgtacctgcagggtcccatctgggccaagattcctcacacggacggcaacttccacccgtctccgctgatgggcggctttggcctgaaacatcctccgcctcagatcctgatcaagaacacgcctgtacctgcggatcctccgaccaccttcaaccagtcaaagctgaactctttcatcacgcaatgcagcaccggacaggtcagcgtggaaattgaatgggagctgcagaaggaaaacagcaagcgctggaaccccgagatccagtacacctccaactactacaaatctacaagtgtggactttgctgttaatacagaaggcgtgtactctgaaccccgccccattggcacccgttacctcacccgtaatctgtaa

SEQ ID NO: 3867 - DNA, 2217 bp, Artificial Sequence
  source: /note="Description of Artificial Sequence: Synthetic polynucleotide"
atggctgccgatggttatcttccagattggctcgaggacaacctctctgagggcattcgcgagtggtgggcgctgaaacctggagccccgaagcccaaagccaaccagcaaaagcaggacgacggccggggtctggtgcttcctggctacaagtacctcggacccttcaacggactcgacaagggggagcccgtcaacgcggcggacgcggcggccctcgagcacgacaaggcctacgaccagcagctgcaggcgggtgacaatccgtacctgcggtataaccacgccgacgccgagtttcaggagcgtctgcaagaagatacgtcttttgggggcaacctcgggcgagcagtcttccaggccaagaagcgggttctcgaacctctcggtctggttgaggaaggcgctaagacggctcctggaaagaagagaccggtagagccatcaccccagcgttctccagactcctctacgggcatcggcaagaagggccaacagcccgccagaaaaagactcaattttggtcagactggcgactcagagtcagttccagaccctcaacctctcggagaacctccagcagcgccctctggtgtgggacctaatacaatggctgcaggcggtggcgcaccaatggcagacaataacgaaggcgccgacggagtgggtagttcctcgggaaattggcattgcgattccacatggctgggcgacagagtcatcaccaccagcacccgaacctgggccctgcccacctacaacaaccacctctacaagcaaatctccaacgggacatcgggaggagccaccaacgacaacacctacttcggctacagcaccccctgggggtattttgactttaacagattccactgccacttttcaccacgtgactggcagcgactcatcaacaacaactggggattccggcccaagagactcagcttcaagctcttcaacatccaggtcaaggaggtcacgcagaatgaaggcaccaagaccatcgccaataacctcaccagcaccatccaggtgtttacggactcggagtaccagctgccgtacgttctcggctctgcccaccagggctgcctgcctccgttcccggcggacgtgttcacgattccccagtacggctacctaacactcaacaacggtagtcaggccgtgggacgctcctccttctactgcctggaatactttccttcgcagatgctgagaaccggcaacaacttccagtttacttacaccttcgaggacgtgcctttccgcagcagctacgcccacagccagagcttggaccggctgatgaatcctctgattgaccagtacctgtactacttgtctcggattcaaacaacaggaggcacggcaaatacgcagactctgggcttcagccaaggtgggcctaatacaatggccaatcaggcaaagaactggctgccaggaccctgttaccgccaacaacgcgtctcaacgacaaccgggcaaaacaacaatagcaactttgcctggactgctgggaccaaataccatctgaatggaagaaattcattggctaatcctggcatcgctatggcaacacacaaagacgacgaggagcgtttttttcccagtaacgggatcctgatttttggcaaacaaaatgctgccagagacaatgcggattacagcgatgtcatgcccaccagcgaggaagaaatcaaaaccactaaccctgtggccacagaggaatacggtatcgtggcagataacttgcagcagcaaaacacggctcctcaaattggaactgtcaacagccagggggccttacccggtatggtctggcagaaccgggacgtgtacctgcagggtcccatctgggccaagattcctcacacggacggcaacttccacccgtctccgctgatgggcggctttggcctgaaacatcctccgcctcagatcctgatcaagaacacgcctgtacctgcggatcctccgaccaccttcaaccagtcaaagctgaactctttcatcacgcaatacagcaccggacaggtcagcgtggaaattgaatgggagctgcagaaggaaaacagcaagcgctggaaccccgagatccagtacacctccaactactacaaatctacaagtgtggactttgctgttaatacagaaggcgtgtactctgaaccccgccccattggcacccgttacctcacccgtaatctgtaa

SEQ ID NO: 3868 - DNA, 2217 bp, Artificial Sequence
  source: /note="Description of Artificial Sequence: Synthetic polynucleotide"
atggctgccgatggttatcttccagattggctcgaggacaacctctctgagggcattcgcgagtggtgggcgctgaaacctggagccccgaagcccaaagccaaccagcaaaagcaggacgacggccggggtctggtgcttcctggctacaagcacctcggacccttcaacggactcgacaagggggagcccgtcaacgcggcggacgcggcggccctcgagcacgacaaggcctacgaccagcagctgcaggcgggtgacaatccgtacctgcggtataaccacgccgacgccgagtttcaggagcgtctgcaagaagatacgtcttttgggggcaacctcgggcgagcagtcttccaggccaagaagcgggttctcgaacctctcggtctggttgaggaaggcgctaagacggctcctggaaagaagagaccggtagagccatcaccccagcgttctccagactcctctacgggcatcggcaagaagggccaacagcccgccagaaaaagactcaattttggtcagactggcgactcagagtcagttccagaccctcaacctctcggagaacctccagcagcgccctctggtgtgggacctaatacaatggctgcaggcggtggcgcaccaatggcagacaataacgaaggcgccgacggagtgggtagttcctcgggaaattggcattgcgattccacatggctgggcgacagagtcatcaccaccagcacccgaacctgggccctgcccacctacaacaaccacctctacaagcaaatctccaacgggacatcgggaggagccaccaacgacaacacctacttcggctacagcaccccctgggggtattttgactttaacagattccactgccacttttcaccacgtgactggcagcgactcatcaacaacaactggggattccggcccaagagactcagcttcaagctcttcaacatccaggtcaaggaggtcacgcagaatgaaggcaccaagaccatcgccaataacctcaccagcaccatccaggtgtttacggactcggagtaccagctgccgtacgttctcggctctgcccaccagggctgcctgcctccgttcccggcggacgtgttcacgattccccagtacggctacctaacactcaacaacggtagtcaggccgtgggacgctcctccttctactgcctggaatactttccttcgcagatgctgagaaccggcaacaacttccagtttacttacaccttcgaggacgtgcctttccacagcagctacgcccacagccagagcttggaccggctgatgaatcctctgattgaccagtacctgtactacttgtctcggattcaaacaacaggaggcacggcaaatacgcagactctgggcttcagccaaggtgggcctaatacaatggccaatcaggcaaagaactggctgccaggaccctgttaccgccaacaacgcgtctcaacgacaaccgggcaaaacaacaatagcaactttgcctggactgctgggaccaaataccatctgaatggaagaaattcattggctaatcctggcatcgctatggcaacacacaaagacgacgaggagcgtttttttcccagtaacgggatcctgatttttggcaaacaaaatgctgccagagacaatgcggattacagcgatgtcatgcccaccagcgaggaagaaatcaaaaccactaaccctgtggccacagaggaatacggtatcgtggcagataacttgcagcagcaaaacacggctcctcaaattggaactgtcaacagccagggggccttacccggtatggtctggcagaaccgggacgtgtacctgcagggtcccatctgggccaagattcctcacacggacggcaacttccacccgtctccgctgatgggcggctttggcctgaaacatcctccgcctcagatcctgatcaagaacacgcctgtacctgcggatcctccgaccaccttcaaccagtcaaagctgaactctttcatcacgcaatacagcaccggacaggtcagcgtggaaattgaatgggagctgcagaaggaaaacagcaagcgctggaaccccgagatccagtacacctccaactactacaaatctacaagtgtggactttgctgttaatacagaaggcgtgtactctgaaccccgccccattggcacccgttacctcacccgtaatctgtaa

SEQ ID NO: 3869 - DNA, 2217 bp, Artificial Sequence
  source: /note="Description of Artificial Sequence: Synthetic polynucleotide"
atggctgccgatggttatcttccagattggctcgaggacaacctctctgagggcattcgcgagtggtgggcgctgaaacctggagccccgaagcccaaagccaaccagcaaaagcaggacgacggccggggtctggtgcttcctggctacaagtacctcggacccttcaacggactcgacaagggggagcccgtcaacgcggcggacgcggcggccctcgagcacgacaaggcctacgaccagcagctgcaggcgggtgacaatccgtacctgcggtataaccacgccgacgccgagtttcaggagcgtctgcaagaagatacgtcttttgggggcaacctcgggcgagcagtcttccaggccaagaagcgggttctcgaacctctcggtctggttgaggaaggcgctaagacggctcctggaaagaagagaccggtagagccatcaccccagcgttctccagactcctctacgggcatcggcaagaagggccaacagcccgccagaaaaagactcaattttggtcagactggcgactcagagtcagttccagaccctcaacctctcggagaacctccagcagcgccctctggtgtgggacctaatacaatggctgcaggcggtggcgcaccaatggcagacaataacgaaggcgccgacggagtgggtagttcctcgggaaattggcattgcgattccacatggctgggcgacagagtcatcaccaccagcacccgaacctgggccctgcccacctacaacaaccacctctacaagcaaatctccaacgggacatcgggaggagccaccaacgacaacacctacttcggctacagcaccccctgggggtattttgactttaacagattccactgccacttttcaccacgtgactggcagcgactcatcaacaacaactggggattccggcccaagagactcagcttcaagctcttcaacatccaggtcaaggaggtcacgcagaatgaaggcaccaagaccatcgccaataacctcaccagcaccatccaggtgtttacggactcggagtaccagctgccgtacgttctcggctctgcccaccagggctgcctgcctccgttcccggcggacgtgttcacgattccccagtacggctacctaacactcaacaacggtagtcaggccgtgggacgctcctccttctactgcctggaatactttccttcgcagatgctgagaaccggcaacaacttccagtttacttacaccttcgaggacgtgcctttccacagcagctacgcccacagccagagcttggaccggctgatgaatcctctgattgaccagtacctgtactacttgtctcggattcaaacaacaggaggcacggcaaatacgcagactctgggcttcagccaaggtgggcctaatacaatggccaatcaggcaaagaactggctgccaggaccctgttaccgccaacaacgcgtctcagcgacaaccgggcaaaacaacaatagcaactttgcctggactgctgggaccaaataccatctgaatggaagaaattcattggctaatcctggcatcgctatggcaacacacaaagacgacgaggagcgtttttttcccagtaacgggatcctgatttttggcaaacaaaatgctgccagagacaatgcggattacagcgatgtcatgcccaccagcgaggaagaaatcaaaaccactaaccctgtggccacagaggaatacggtatcgtggcagataacttgcagcagcaaaacacggctcctcaaattggaactgtcaacagccagggggccttacccggtatggtctggcagaaccgggacgtgtacctgcagggtcccatctgggccaagattcctcacacggacggcaacttccacccgtctccgctgatgggcggctttggcctgaaacatcctccgcctcagatcctgatcaagaacacgcctgtacctgcggatcctccgaccaccttcaaccagtcaaagctgaactctttcatcacgcaatacagcaccggacaggtcagcgtggaaattgaatgggagctgcagaaggaaaacagcaagcgctggaaccccgagatccagtacacctccaactactacaaatctacaagtgtggactttgctgttaatacagaaggcgtgtactctgaaccccgccccattggcacccgttacctcacccgtaatctgtaa

SEQ ID NO: 3870 - DNA, 2217 bp, Artificial Sequence
  source: /note="Description of Artificial Sequence: Synthetic polynucleotide"
atggctgccgatggttatcttccagattggctcgaggacaacctctctgagggcattcgcgagtggtgggcgctgaaacctggagccccgaagcccaaagccaaccagcaaaagcaggacgacggccggggtctggtgcttcctggctacaagtacctcggacccttcaacggactcgacaagggggagcccgtcaacgcggcggacgcggcggccctcgagcacgacaaggcctacgaccagcagctgcaggcgggtgacaatccgtacctgcggtataaccacgccgacgccgagtttcaggagcgtctgcaagaagatacgtcttttgggggcaacctcgggcgagcagtcttccaggccaagaagcgggttctcgaacctctcggtctggttgaggaaggcgctaagacggctcctggaaagaagagaccggtagagccatcaccccagcgttctccagactcctctacgggcatcggcaagaagggccaacagcccgccagaaaaagactcaattttggtcagactggcggctcagagtcagttccagaccctcaacctctcggagaacctccagcagcgccctctggtgtgggacctaatacaatggctgcaggcggtggcgcaccaatggcagacaataacgaaggcgccgacggagtgggtagttcctcgggaaattggcattgcgattccacatggctgggcgacagagtcatcaccaccagcacccgaacctgggccctgcccacctacaacaaccacctctacaagcaaatctccaacgggacatcgggaggagccaccaacgacaacacctacttcggctacagcaccccctgggggtattttgactttaacagattccactgccacttttcaccacgtgactggcagcgactcatcaacaacaactggggattccggcccaagagactcagcttcaagctcttcaacatccaggtcaaggaggtcacgcagaatgaaggcaccaagaccatcgccaataacctcaccagcaccatccaggtgtttacggactcggagtaccagctgccgtacgttctcggctctgcccaccagggctgcctgcctccgttcccggcggacgtgttcacgattccccagtacggctacctaacactcaacaacggtagtcaggccgtgggacgctcctccttctactgcctggaatactttccttcgcagatgctgagaaccggcaacaacttccagtttacttacaccttcgaggacgtgcctttccacagcagctacgcccacagccagagcttggaccggctgatgaatcctctgattgaccagtacctgtactacttgtctcggattcaaacaacaggaggcacggcaaatacgcagactctgggcttcagccaaggtgggcctaatacaatggccaatcaggcaaagaactggctgccaggaccctgttaccgccaacaacgcgtctcaacgacaaccgggcaaaacaacaatagcaactttgcctggactgctgggaccaaataccatctgaatggaagaaattcattggctaatcctggcatcgctatggcaacacacaaagacgacgaggagcgtttttttcccagtaacgggatcctgatttttggcaaacaaaatgctgccagagacaatgcggattacagcgatgtcatgcccaccagcgaggaagaaatcaaaaccactaaccctgtggccacagaggaatacggtatcgtggcagataacttgcagcagcaaaacacggctcctcaaattggaactgtcaacagccagggggccttacccggtatggtctggcagaaccgggacgtgtacctgcagggtcccatctgggccaagattcctcacacggacggcaacttccacccgtctccgctgatgggcggctttggcctgaaacatcctccgcctcagatcctgatcaagaacacgcctgtacctgcggatcctccgaccaccttcaaccagtcaaagctgaactctttcatcacgcaatacagcaccggacaggtcagcgtggaaattgaatgggagctgcagaaggaaaacagcaagcgctggaaccccgagatccagtacacctccaactactacaaatctacaagtgtggactttgctgttaatacagaaggcgtgtactctgaaccccgccccattggcacccgttacctcacccgtaatctgtaa

SEQ ID NO: 3871 - DNA, 2217 bp, Artificial Sequence
  source: /note="Description of Artificial Sequence: Synthetic polynucleotide"
atggctgccgatggttatcttccagattggctcgaggacaacctctctgagggcattcgcgagtggtgggcgctgaaacctggagccccgaagcccaaagccaaccagcaaaagcaggacgacggccggggtctggtgcttcctggctacaagtacctcggacccttcaacggactcgacaagggggagcccgtcaacgcggcggacgcggcggccctcgagcacgacaaggcctacgaccagcagctgcaggcgggtgacaatccgtacctgcggtataaccacgccgacgccgagtttcaggagcgtctgcaagaagatacgtcttttgggggcaacctcgggcgagcagtcttccaggccaagaagcgggttctcgaacctctcggtctggttgaggaaggcgctaagacggctcctggaaagaagagaccggtagagccatcaccccagcgttctccagactcctctacgggcatcggcaagaagggccaacagcccgccagaaaaagactcaattttggtcagactggcgactcagagtcagttccagaccctcaacctctcggagaacctccagcagcgccctctggtgtgggacctaatacaatggctgcaggcggtggcgcaccaatggcagacaataacgaaggcgccgacggagtgggtagttcctcgggaaattggcattgcgattccgcatggctgggcgacagagtcatcaccaccagcacccgaacctgggccctgcccacctacaacaaccacctctacaagcaaatctccaacgggacatcgggaggagccaccaacgacaacacctacttcggctacagcaccccctgggggtattttgactttaacagattccactgccacttttcaccacgtgactggcagcgactcatcaacaacaactggggattccggcccaagagactcagcttcaagctcttcaacatccaggtcaaggaggtcacgcagaatgaaggcaccaagaccatcgccaataacctcaccagcaccatccaggtgtttacggactcggagtaccagctgccgtacgttctcggctctgcccaccagggctgcctgcctccgttcccggcggacgtgttcacgattccccagtacggctacctaacactcaacaacggtagtcaggccgtgggacgctcctccttctactgcctggaatactttccttcgcagatgctgagaaccggcaacaacttccagtttacttacaccttcgaggacgtgcctttccacagcagctacgcccacagccagagcttggaccggctgatgaatcctctgattgaccagtacctgtactacttgtctcggattcaaacaacaggaggcacggcaaatacgcagactctgggcttcagccaaggtgggcctaatacaatggccaatcaggcaaagaactggctgccaggaccctgttaccgccaacaacgcgtctcaacgacaaccgggcaaaacaacaatagcaactttgcctggactgctgggaccaaataccatctgaatggaagaaattcattggctaatcctggcatcgctatggcaacacacaaagacgacgaggagcgtttttttcccagtaacgggatcctgatttttggcaaacaaaatgctgccagagacaatgcggattacagcgatgtcatgcccaccagcgaggaagaaatcaaaaccactaaccctgtggccacagaggaatacggtatcgtggcagataacttgcagcagcaaaacacggctcctcaaattggaactgtcaacagccagggggccttacccggtatggtctggcagaaccgggacgtgtacctgcagggtcccatctgggccaagattcctcacacggacggcaacttccacccgtctccgctgatgggcggctttggcctgaaacatcctccgcctcagatcctgatcaagaacacgcctgtacctgcggatcctccgaccaccttcaaccagtcaaagctgaactctttcatcacgcaatacagcaccggacaggtcagcgtggaaattgaatgggagctgcagaaggaaaacagcaagcgctggaaccccgagatccagtacacctccaactactacaaatctacaagtgtggactttgctgttaatacagaaggcgtgtactctgaaccccgccccattggcacccgttacctcacccgtaatctgtaa

SEQ ID NO: 3872 - DNA, 2217 bp, Artificial Sequence
  source: /note="Description of Artificial Sequence: Synthetic polynucleotide"
atggctgccgatggttatcttccagattggctcgaggacaacctctctgagggcattcgcgagtggtgggcgctgaaacctggagccccgaagcccaaagccaaccagcaaaagcaggacgacggccggggtctggtgcttcctggctacaagtacctcggacccttcaacggactcgacaagggggagcccgtcaacgcggcggacgcggcggccctcgagcacgacaaggcctacgaccagcagctgcaggcgggtgacaatccgtacctgcggtataaccacgccgacgccgagtttcaggagcgtctgcaagaagatacgtcttttgggggcaacctcgggcgagcagtcttccaggccaagaagcgggttctcgaacctctcggtctggttgaggaaggcgctaagacggctcctggaaagaagagaccggtagagccatcaccccagcgttctccagactcctctacgggcatcggcaagaagggccaacagcccgccagaaaaagactcaattttggtcagactggcgactcagagtcagttccagaccctcaacctctcggagaacctccagcagcgccctctggtgtgggacctaatacaatggctgcaggcggtggcgcaccaatggcagacaataacgaaggcgccgacggagtgggtagttcctcgggaaattggcattgcgattccacatggctgggcgacagagtcatcaccaccagcacccgaacctgggccctgcccacctacaacaaccacctctacaagcaaatctccaacgggacatcgggaggagccaccaacgacaacacctacttcggctacagcaccccctgggggtattttgactttaacagattccactgccacttttcaccacgtgactggcagcgactcatcaacaacaactggggattccggcccaagagactcagcttcaagctcttcaacatccaggtcaaggaggtcacgcagaatgaaggcaccaagaccatcgccaataacctcaccagcaccatccaggtgtttacggactcggagtaccagctgccgtacgttctcggctctgcccaccggggctgcctgcctccgttcccggcggacgtgttcacgattccccagtacggctacctaacactcaacaacggtagtcaggccgtgggacgctcctccttctactgcctggaatactttccttcgcagatgctgagaaccggcaacaacttccagtttacttacaccttcgaggacgtgcctttccacagcagctacgcccacagccagagcttggaccggctgatgaatcctctgattgaccagtacctgtactacttgtctcggattcaaacaacaggaggcacggcaaatacgcagactctgggcttcagccaaggtgggcctaatacaatggccaatcaggcaaagaactggctgccaggaccctgttaccgccaacaacgcgtctcaacgacaaccgggcaaaacaacaatagcaactttgcctggactgctgggaccaaataccatctgaatggaagaaattcattggctaatcctggcatcgctatggcaacacacaaagacgacgaggagcgtttttttcccagtaacgggatcctgatttttggcaaacaaaatgctgccagagacaatgcggattacagcgatgtcatgcccaccagcgaggaagaaatcaaaaccactaaccctgtggccacagaggaatacggtatcgtggcagataacttgcagcagcaaaacacggctcctcaaattggaactgtcaacagccagggggccttacccggtatggtctggcagaaccgggacgtgtacctgcagggtcccatctgggccaagattcctcacacggacggcaacttccacccgtctccgctgatgggcggctttggcctgaaacatcctccgcctcagatcctgatcaagaacacgcctgtacctgcggatcctccgaccaccttcaaccagtcaaagctgaactctttcatcacgcaatacagcaccggacaggtcagcgtggaaattgaatgggagctgcagaaggaaaacagcaagcgctggaaccccgagatccagtacacctccaactactacaaatctacaagtgtggactttgctgttaatacagaaggcgtgtactctgaaccccgccccattggcacccgttacctcacccgtaatctgtaa

SEQ ID NO: 3873 - DNA, 2217 bp, Artificial Sequence
  source: /note="Description of Artificial Sequence: Synthetic polynucleotide"
atggctgccgatggttatcttccagattggctcgaggacaacctctctgagggcattcgcgagtggtgggcgctgaaacctggagccccgaagcccaaagccaaccagcaaaagcaggacgacggccggggtctggtgcttcctggctacaagtacctcggacccttcaacggactcgacaagggggagcccgtcaacgcggcggacgcggcggccctcgagcacgacaaggcctacgaccagcagctgcaggcgggtgacaatccgtacctgcggtataaccacgccgacgccgagtttcaggagcgtctgcaagaagatacgtcttttgggggcaacctcgggcgagcagtcttccaggccaagaagcgggttctcgaacctctcggtctggttgaggaaggcgctaagacggctcctggaaagaagagaccggtagagccatcaccccagcgttctccagactcctctacgggcatcggcaagaagggccaacagcccgccagaaaaagactcaattttggtcagactggcgactcagagtcagttccagaccctcaacctctcggagaacctccagcagcgccctctggtgtgggacctaatacaatggctgcaggcggtggcgcaccaatggcagacaataacgaaggcgccgacggagtgggtagttcctcgggaaattggcattgcgattccacatggctgggcgacagagtcatcaccaccagcacccgaacctgggccctgcccacctacaacaaccacctctacaagcaaatctccaacgggacatcgggaggagccaccaacgacaacacctacttcggctacagcaccccctgggggtattttgactttaacagattccactgccacttttcaccacgtgactggcagcgactcatcaacaacaactggggattccggcccaagagactcagcttcaagctcttcaacatccaggtcaaggaggtcacgcagaatgaaggcaccaagaccatcgccaataacctcaccagcaccatccaggtgtttacggactcggagtaccagctgccgtacgttctcggctctgcccaccagggctgcctgcctccgttcccggcggacgtgttcacgattccccagtacggctacctaacactcaacaacggtagtcaggccgtgggacgctcctccttctactgcctggaatactttccttcgcagatgctgagaaccggcaacaacttccagtttacttacaccttcgaggacgtgcctttccacagcagctacgcccacagccagagcttggaccggctgatgaatcctctgattgaccagtacctgtactacttgtctcggattcaaacaacaggaggcacggcaaatacgcagactctgggcttcagccaaggtgggcctaatacaatggccaatcaggcaaagaactggctgccaggaccctgttaccgccaacaacgcgtctcaacgacaaccgggcaaaacaacaatagcaactttgcctggactgctgggaccaaataccatctgaatggaagaaattcattggctaatcctggcatcgctatggcaacacacaaagacgacgaggagcgtttttttcccagtaacgggatcctgatttttggcaaacaaaatgctgccagagacaatgcggattacagcgatgtcatgcccaccagcgaggaagaaatcaaaaccactaaccctgtggccacagaggaatacggtatcgtggcagataacttgcagcagcaaaacacggctcctcaaattggaactgtcaacagccagggggccttacccggtatggtctggcagaaccgggacgtgtacctgcagggtcccatctgggccaagattcctcacacggacggcaacttccacccgtctccgctgatgggcggctttggcctgaaacatcctccgcctcagatcctgatcaagaacacgcctgtatctgcggatcctccgaccaccttcaaccagtcaaagctgaactctttcatcacgcaatacagcaccggacaggtcagcgtggaaattgaatgggagctgcagaaggaaaacagcaagcgctggaaccccgagatccagtacacctccaactactacaaatctacaagtgtggactttgctgttaatacagaaggcgtgtactctgaaccccgccccattggcacccgttacctcacccgtaatctgtaa

SEQ ID NO: 3874 - DNA, 2217 bp, Artificial Sequence
  source: /note="Description of Artificial Sequence: Synthetic polynucleotide"
atggctgccgatggttatcttccagattggctcgaggacaacctctctgagggcattcgcgagtggtgggcgctgaaacctggagccccgaagcccaaagccaaccagcaaaagcaggacgacggccggggtctggtgcttcctggctacaggtacctcggacccttcaacggactcgacaagggggagcccgtcaacgcggcggacgcggcggccctcgagcacgacaaggcctacgaccagcagctgcaggcgggtgacaatccgtacctgcggtataaccacgccgacgccgagtttcaggagcgtctgcaagaagatacgtcttttgggggcaacctcgggcgagcagtcttccaggccaagaagcgggttctcgaacctctcggtctggttgaggaaggcgctaagacggctcctggaaagaagagaccggtagagccatcaccccagcgttctccagactcctctacgggcatcggcaagaagggccaacagcccgccagaaaaagactcaattttggtcagactggcgactcagagtcagttccagaccctcaacctctcggagaacctccagcagcgccctctggtgtgggacctaatacaatggctgcaggcggtggcgcaccaatggcagacaataacgaaggcgccgacggagtgggtagttcctcgggaaattggcattgcgattccacatggctgggcgacagagtcatcaccaccagcacccgaacctgggccctgcccacctacaacaaccacctctacaagcaaatctccaacgggacatcgggaggagccaccaacgacaacacctacttcggctacagcaccccctgggggtattttgactttaacagattccactgccacttttcaccacgtgactggcagcgactcatcaacaacaactggggattccggcccaagagactcagcttcaagctcttcaacatccaggtcaaggaggtcacgcagaatgaaggcaccaagaccatcgccaataacctcaccagcaccatccaggtgtttacggactcggagtaccagctgccgtacgttctcggctctgcccaccagggctgcctgcctccgttcccggcggacgtgttcacgattccccagtacggctacctaacactcaacaacggtagtcaggccgtgggacgctcctccttctactgcctggaatactttccttcgcagatgctgagaaccggcaacaacttccagtttacttacaccttcgaggacgtgcctttccacagcagctacgcccacagccagagcttggaccggctgatgaatcctctgattgaccagtacctgtactacttgtctcggattcaaacaacaggaggcacggcaaatacgcagactctgggcttcagccaaggtgggcctaatacaatggccaatcaggcaaagaactggctgccaggaccctgttaccgccaacaacgcgtctcaacgacaaccgggcaaaacaacaatagcaactttgcctggactgctgggaccaaataccatctgaatggaagaaattcattggctaatcctggcatcgctatggcaacacacaaagacgacgaggagcgtttttttcccagtaacgggatcctgatttttggcaaacaaaatgctgccagagacaatgcggattacagcgatgtcatgcccaccagcgaggaagaaatcaaaaccactaaccctgtggccacagaggaatacggtatcgtggcagataacttgcagcagcaaaacacggctcctcaaattggaactgtcaacagccagggggccttacccggtatggtctggcagaaccgggacgtgtacctgcagggtcccatctgggccaagattcctcacacggacggcaacttccacccgtctccgctgatgggcggctttggcctgaaacatcctccgcctcagatcctgatcaagaacacgcctgtacctgcggatcctccgaccaccttcaaccagtcaaagctgaactctttcatcacgcaatacagcactggacaggtcagcgtggaaattgaatgggagctgcagaaggaaaacagcaagcgctggaaccccgagatccagtacacctccaactactacaaatctacaagtgtggactttgctgttaatacagaaggcgtgtactctgaaccccgccccattggcacccgttacctcacccgtaatctgtaa

SEQ ID NO: 3875 - DNA, 2217 bp, Artificial Sequence
  source: /note="Description of Artificial Sequence: Synthetic polynucleotide"
atggctgccgatggttatcttccagattggctcgaggacaacctctctgagggcattcgcgagtggtgggcgctgaaacctggagccccgaagcccaaagccaaccagcaaaagcaggacgacggccggggtctggtgcttcctggctacaagtacctcggacccttcaacggactcgacaagggggagcccgtcaacgcggcggacgcggcggccctcgagcacgacaaggcctacgaccagcagctgcaggcgggtgacaatccgtacctgcggtataaccacgccgacgccgagtttcaggagcgtctgcaagaagatacgtcttttgggggcaacctcgggcgagcagtcttccaggccaagaagcgggttctcgaacctctcggtctggttgaggaaggcgctaagacggctcctggaaagaagagaccggtagagccatcaccccagcgttctccagactcctctacgggcatcggcaagaagggccaacagcccgccagaaaaagactcaattttggtcagactggcgactcagagtcagttccagaccctcaacctctcggagaacctccagcagcgccctctggtgtgggacctaatacaatggctgcaggcggtggcgcaccaatggcagacaataacgaaggcgccgacggagtgggtagttcctcgggaaattggcattgcgattccacatggctgggcgacagagtcatcaccaccagcacccgaacctgggccctgcccacctacaacaaccacctctacaagcaaatctccaacgggacatcgggaggagccaccaacgacaacacctacttcggctacagcaccccctgggggtattttgactttaacagattccactgccacttttcaccacgtgactggcagcgactcatcaacaacaactggggattccggcccaagagactcagcttcaagctcttcaacatccaggtcaaggaggtcacgcagaatgaaggcaccaagaccatcgccaataacctcaccagcaccatccaggtgtttacggactcggagtaccagctgccgtacgttctcggctctgcccaccagggctgcctgcctccgttcccggcggacgtgttcacgattccccagtacggctacctaacactcaacaacggtagtcaggccgtgggacgctcctccttctactgcctggaatactttccttcgcagatgctgagaaccggcaacaacttccagtttacttacaccttcgaggacgtgcctttccacagcagctacgcccacagccagagcttggaccggctgatgaatcctctgattgaccagtacctgtactacttgtctcggattcaaacaacaggaggcacggcaaatacgcagactctgggcttcagccaaggtgggcctaatacaatggccaatcaggcaaagaactggctgccaggaccctgttaccgccaacaacgcgtctcaacgacaaccgggcaaaacaacaatagcaactttgcctggactgctgggaccaaataccgtctgaatggaagaaattcattggctaatcctggcatcgctatggcaacacacaaagacgacgaggagcgtttttttcccagtaacgggatcctgatttttggcaaacaaaatgctgccagagacaatgcggattacagcgatgtcatgcccaccagcgaggaagaaatcaaaaccactaaccctgtggccacagaggaatacggtatcgtggcagataacttgcagcagcaaaacacggctcctcaaattggaactgtcaacagccagggggccttacccggtatggtctggcagaaccgggacgtgtacctgcagggtcccatctgggccaagattcctcacacggacggcaacttccacccgtctccgctgatgggcggctttggcctgaaacatcctccgcctcagatcctgatcaagaacacgcctgtacctgcggatcctccgaccaccttcaaccagtcaaagctgaactctttcatcacgcaatacagcaccggacaggtcagcgtggaaattgaatgggagctgcagaaggaaaacagcaagcgctggaaccccgagatccagtacacctccaactactacaaatctacaagtgtggactttgctgttaatacagaaggcgtgtactctgaaccccgccccattggcacccgttacctcacccgtaatctgtaa

SEQ ID NO: 3876 - DNA, 2217 bp, Artificial Sequence
  source: /note="Description of Artificial Sequence: Synthetic polynucleotide"
atggctgccgatggttatcttccagattggctcgaggacaacctctctgagggcattcgcgagtggtgggcgctgaaacctggagccccgaagcccaaagccaaccagcaaaagcaggacgacggccggggtctggtgcttcctggctacaagtacctcggacccttcaacggactcgacaagggggagcccgtcaacgcggcggacgcggcggccctcgagcacgacaaggcctacgaccagcagctgcaggcgggtgacaatccgtacctgcggtataaccacgccgacgccgagtttcaggagcgtctgcaagaagatacgtcttttgggggcaacctcgggcgagcagtcttccaggccaagaagcgggttctcgaacctctcggtctggttgaggaaggcgctaagacggctcctggaaagaagagaccggtagagccatcaccccagcgttctccagactcctctacgggcatcggcaagaagggccaacagcccgccagaaaaagactcaattttggtcagactggcgactcagagtcagctccagaccctcaacctctcggagaacctccagcagcgccctctggtgtgggacctaatacaatggctgcaggcggtggcgcaccaatggcagacaataacgaaggcgccgacggagtgggtagttcctcgggaaattggcattgcgattccacatggctgggcgacagagtcatcaccaccagcacccgaacctgggccctgcccacctacaacaaccacctctacaagcaaatctccaacgggacatcgggaggagccaccaacgacaacacctacttcggctacagcaccccctgggggtattttgactttaacagattccactgccacttttcaccacgtgactggcagcgactcatcaacaacaactggggattccggcccaagagactcagcttcaagctcttcaacatccaggtcaaggaggtcacgcagaatgaaggcaccaagaccatcgccaataacctcaccagcaccatccaggtgtttacggactcggagtaccagctgccgtacgttctcggctctgcccaccagggctgcctgcctccgttcccggcggacgtgttcacgattccccagtacggctacctaacactcaacaacggtagtcaggccgtgggacgctcctccttctactgcctggaatactttccttcgcagatgctgagaaccggcaacaacttccagtttacttacaccttcgaggacgtgcctttccacagcagctacgcccacagccagagcttggaccggctgatgaatcctctgattgaccagtacctgtactacttgtctcggattcaaacaacaggaggcacggcaaatacgcagactctgggcttcagccaaggtgggcctaatacaatggccaatcaggcaaagaactggctgccaggaccctgttaccgccaacaacgcgtctcaacgacaaccgggcaaaacaacaatagcaactttgcctggactgctgggaccaaataccatctgaatggaagaaattcattggctaatcctggcatcgctatggcaacacacaaagacgacgaggagcgtttttttcccagtaacgggatcctgatttttggcaaacaaaatgctgccagagacaatgcggattacagcgatgtcatgcccaccagcgaggaagaaatcaaaaccactaaccctgtggccacagaggaatacggtatcgtggcagataacttgcagcagcaaaacacggctcctcaaattggaactgtcaacagccagggggccttacccggtatggtctggcagaaccgggacgtgtacctgcagggtcccatctgggccaagattcctcacacggacggcaacttccacccgtctccgctgatgggcggctttggcctgaaacatcctccgcctcagatcctgatcaagaacacgcctgtacctgcggatcctccgaccaccttcaaccagtcaaagctgaactctttcatcacgcaatacagcaccggacaggtcagcgtggaaattgaatgggagctgcagaaggaaaacagcaagcgctggaaccccgagatccagtacacctccaactactacaaatctacaagtgtggactttgctgttaatacagaaggcgtgtactctgaaccccgccccattggcacccgttacctcacccgtaatctgtaa

SEQ ID NO: 3877 - DNA, 2217 bp, Artificial Sequence
  source: /note="Description of Artificial Sequence: Synthetic polynucleotide"
atggctgccgatggttatcttccagattggctcgaggacaacctctctgagggcattcgcgagtggtgggcgctgaaacctggagccccgaagcccaaagccaaccagcaaaagcaggacgacggccggggtctggtgcttcctggctacaagtacctcggacccttcaacggactcgacaagggggagcccgtcaacgcggcggacgcggcggccctcgagcacgacaaggcctacgaccagcagctgcaggcgggtgacaatccgtacctgcggtataaccacgccgacgccgagtttcaggagcgtctgcaagaagatacgtcttttgggggcaacctcgggcgagcagtcttccaggccaagaagcgggttctcgaacctctcggtctggttgaggaaggcgctaagacggctcctggaaagaagagaccggtagagccatcaccccagcgttctccagacccctctacgggcatcggcaagaagggccaacagcccgccagaaaaagactcaattttggtcagactggcgactcagagtcagttccagaccctcaacctctcggagaacctccagcagcgccctctggtgtgggacctaatacaatggctgcaggcggtggcgcaccaatggcagacaataacgaaggcgccgacggagtgggtagttcctcgggaaattggcattgcgattccacatggctgggcgacagagtcatcaccaccagcacccgaacctgggccctgcccacctacaacaaccacctctacaagcaaatctccaacgggacatcgggaggagccaccaacgacaacacctacttcggctacagcaccccctgggggtattttgactttaacagattccactgccacttttcaccacgtgactggcagcgactcatcaacaacaactggggattccggcccaagagactcagcttcaagctcttcaacatccaggtcaaggaggtcacgcagaatgaaggcaccaagaccatcgccaataacctcaccagcaccatccaggtgtttacggactcggagtaccagctgccgtacgttctcggctctgcccaccagggctgcctgcctccgttcccggcggacgtgttcacgattccccagtacggctacctaacactcaacaacggtagtcaggccgtgggacgctcctccttctactgcctggaatactttccttcgcagatgctgagaaccggcaacaacttccagtttacttacaccttcgaggacgtgcctttccacagcagctacgcccacagccagagcttggaccggctgatgaatcctctgattgaccagtacctgtactacttgtctcggattcaaacaacaggaggcacggcaaatacgcagactctgggcttcagccaaggtgggcctaatacaatggccaatcaggcaaagaactggctgccaggaccctgttaccgccaacaacgcgtctcaacgacaaccgggcaaaacaacaatagcaactttgcctggactgctgggaccaaataccatctgaatggaagaaattcattggctaatcctggcatcgctatggcaacacacaaagacgacgaggagcgtttttttcccagtaacgggatcctgatttttggcaaacaaaatgctgccagagacaatgcggattacagcgatgtcatgcccaccagcgaggaagaaatcaaaaccactaaccctgtggccacagaggaatacggtatcgtggcagataacttgcagcagcaaaacacggctcctcaaattggaactgtcaacagccagggggccttacccggtatggtctggcagaaccgggacgtgtacctgcagggtcccatctgggccaagattcctcacacggacggcaacttccacccgtctccgctgatgggcggctttggcctgaaacatcctccgcctcagatcctgatcaagaacacgcctgtacctgcggatcctccgaccaccttcaaccagtcaaagctgaactctttcatcacgcaatacagcaccggacaggtcagcgtggaaattgaatgggagctgcagaaggaaaacagcaagcgctggaaccccgagatccagtacacctccaactactacaaatctacaagtgtggactttgctgttaatacagaaggcgtgtactctgaaccccgccccattggcacccgttacctcacccgtaatctgtaa

SEQ ID NO: 3878 - DNA, 2217 bp, Artificial Sequence
  source: /note="Description of Artificial Sequence: Synthetic polynucleotide"
atggctgccgatggttatcttccagattggctcgaggacaacctctctgagggcattcgcgagtggtgggcgctgaaacctggagccccgaagcccaaagccaaccagcaaaagcaggacgacggccggggtctggtgcttcctggctacaagtacctcggacccttcaacggactcgacaagggggagcccgtcaacgcggcggacgcggcggccctcgagcacgacaaggcctacgaccagcagctgcaggcgggtgacaatccgtacctgcggtataaccacgccgacgccgagtttcaggagcgtctgcaagaagatacgtcttttgggggcaacctcgggcgagcagtcttccaggccaagaagcgggttctcgaacctctcggtctggttgaggaaggcgctaagacggctcctggaaagaagagaccggtagagccatcaccccagcgttctccagactcctctacgggcatcggcaagaagggccaacagcccgccagaaaaagactcaattttggtcagactggcgactcagagtcagttccagaccctcaacctctcggagaacctccagcagcgccctctggtgtgggacctaatacaatggctgcaggcggtggcgcaccaatggcagacaataacgaaggcgccgacggagtgggtagttcctcgggaaattggcattgcgattccacatggctgggcgacagagtcatcaccaccagcacccgaacctgggccctgcccacctacaacaaccacctctacaagcaaatctccaacgggacatcgggaggagccaccaacgacaacacctacttcggctacagcaccccctgggggtattttgactttaacagattccactgccacttttcaccacgtgactggcagcgactcatcaacaacaactggggattccggcccaagagactcagcttcaagctcttcaacatccaggtcaaggaggtcacgcagaatgaaggcaccaagaccatcgccaataacctcaccagcaccatccaggtgtttacggactcggagtaccggctgccgtacgttctcggctctgcccaccagggctgcctgcctccgttcccggcggacgtgttcacgattccccagtacggctacctaacactcaacaacggtagtcaggccgtgggacgctcctccttctactgcctggaatactttccttcgcagatgctgagaaccggcaacaacttccagtttacttacaccttcgaggacgtgcctttccacagcagctacgcccacagccagagcttggaccggctgatgaatcctctgattgaccagtacctgtactacttgtctcggattcaaacaacaggaggcacggcaaatacgcagactctgggcttcagccaaggtgggcctaatacaatggccaatcaggcaaagaactggctgccaggaccctgttaccgccaacaacgcgtctcaacgacaaccgggcaaaacaacaatagcaactttgcctggactgctgggaccaaataccatctgaatggaagaaattcattggctaatcctggcatcgctatggcaacacacaaagacgacgaggagcgtttttttcccagtaacgggatcctgatttttggcaaacaaaatgctgccagagacaatgcggattacagcgatgtcatgcccaccagcgaggaagaaatcaaaaccactaaccctgtggccacagaggaatacggtatcgtggcagataacttgcagcagcaaaacacggctcctcaaattggaactgtcaacagccagggggccttacccggtatggtctggcagaaccgggacgtgtacctgcagggtcccatctgggccaagattcctcacacggacggcaacttccacccgtctccgctgatgggcggctttggcctgaaacatcctccgcctcagatcctgatcaagaacacgcctgtacctgcggatcctccgaccaccttcaaccagtcaaagctgaactctttcatcacgcaatacagcaccggacaggtcagcgtggaaattgaatgggagctgcagaaggaaaacagcaagcgctggaaccccgagatccagtacacctccaactactacaaatctacaagtgtggactttgctgttaatacagaaggcgtgtactctgaaccccgccccattggcacccgttacctcacccgtaatctgtaa

SEQ ID NO: 3879 - DNA, 2217 bp, Artificial Sequence
  source: /note="Description of Artificial Sequence: Synthetic polynucleotide"
atggctgccgatggttatcttccagattggctcgaggacaacctctctgagggcattcgcgagtggtgggcgctgaaacctggagccccgaagcccaaagccaaccagcaaaagcaggacgacggccggggtctggtgcttcctggctacaagtacctcggacccttcaacggactcgacaagggggagcccgtcaacgcggcggacgcggcggccctcgagcacgacaaggcctacgaccagcagctgcaggcgggtgacaatccgtacctgcggtataaccacgccgacgccgagtttcaggagcgtctgcaagaagatacgtcttttgggggcaacctcgggcgagcagtcttccaggccaagaagcgggttctcgaacctctcggtctggttgaggaaggcgctaagacggctcctggaaagaagagaccggtagagccatcaccccagcgttctccagactcctctacgggcatcggcaagaagggccaacagcccgccagaaaaagactcaattttggtcagactggcgactcagagtcagttccagaccctcaacctctcggagaacctccagcagcgccctctggtgtgggacctaatacaatggctgcaggcggtggcgcaccaatggcagacaataacgaaggcgccgacggagtgggtagttcctcgggaaattggcattgcgattccacatggctgggcgacagagtcatcaccaccagcacccgaacctgggccctgcccacctacaacaaccacctctacaagcaaatctccaacgggacatcgggaggagccaccaacgacaacacctacttcggctacagcaccccctgggggtattttgactttaacagattccactgccacttttcaccacgtgactggcagcgactcatcaacaacaactggggattccggcccaagagactcagcttcaagctcttcaacatccaggtcaaggaggtcacgcagaatgaaggcaccaagaccatcgccaataacctcaccagcaccatccaggtgtttacggactcggagtaccagctgccgtacgttctcggctctgcccaccagggctgcctgcctccgttcccggcggacgtgttcacgattccccagtacggctacctaacactcaacaacggtagtcaggccgtgggacgctcctccttctactgcctggaatactttccttcgcagatgctgagaaccggcaacaacttccagtttacttacaccttcgaggacgtgcctttccacagcagctacgcccacagccagagcttggaccggctgatgaatcctctgattgaccagtacctgtactacttgtctcggattcaaacaacaggaggcacggcaaatacgcagactctgggcttcagccaaggtgggcctaatacaatggccaatcaggcaaagaactggctgccaggaccctgttaccgccaacaacgcgtctcaacgacaaccgggcaaaacaacaatagcaactttgcctggactgctgggaccaaataccatctgaatggaagaaattcattggctaatcctggcatcgctatggcaacacacaaagacgacgaggagcgtttttttcccagtaacgggatcctgatttttggcaaacaaaatgctgccagagacaatgcggattacagcgatgtcatgcccaccagcgaggaagaaatcaaaaccactaaccctgtggccacagaggaatacggtatcgtggcagataacttgcagcagcaaaacacggctcctcaaattggaactgtcaacagccagggggccttacccggtatggtctggcagaaccgggacgtgtacctgcagggtcccatctgggccaagattcctcacacggacggcaacttccacccgtctccgctgatgggcggctttggcctgaaacatcctccgcctcagatcctgatcaagaacacgcctgtacctgcggatcctccgaccaccttcaaccagccaaagctgaactctttcatcacgcaatacagcaccggacaggtcagcgtggaaattgaatgggagctgcagaaggaaaacagcaagcgctggaaccccgagatccagtacacctccaactactacaaatctacaagtgtggactttgctgttaatacagaaggcgtgtactctgaaccccgccccattggcacccgttacctcacccgtaatctgtaa

SEQ ID NO: 3880 - DNA, 2217 bp, Artificial Sequence
  source: /note="Description of Artificial Sequence: Synthetic polynucleotide"
atggctgccgatggttatcttccagattggctcgaggacaacctctctgagggcattcgcgagtggtgggcgctgaaacctggagccccgaagcccaaagccaaccagcaaaagcaggacgacggccggggtctggtgcttcctggctacaagtacctcggacccttcaacggactcgacaagggggagcccgtcaacgcggcggacgcggcggccctcgagcacgacaaggcctacgaccagcagctgcaggcgggtggcaatccgtacctgcggtataaccacgccgacgccgagtttcaggagcgtctgcaagaagatacgtcttttgggggcaacctcgggcgagcagtcttccaggccaagaagcgggttctcgaacctctcggtctggttgaggaaggcgctaagacggctcctggaaagaagagaccggtagagccatcaccccagcgttctccagactcctctacgggcatcggcaagaagggccaacagcccgccagaaaaagactcaattttggtcagactggcgactcagagtcagttccagaccctcaacctctcggagaacctccagcagcgccctctggtgtgggacctaatacaatggctgcaggcggtggcgcaccaatggcagacaataacgaaggcgccgacggagtgggtagttcctcgggaaattggcattgcgattccacatggctgggcgacagagtcatcaccaccagcacccgaacctgggccctgcccacctacaacaaccacctctacaagcaaatctccaacgggacatcgggaggagccaccaacgacaacacctacttcggctacagcaccccctgggggtattttgactttaacagattccactgccacttttcaccacgtgactggcagcgactcatcaacaacaactggggattccggcccaagagactcagcttcaagctcttcaacatccaggtcaaggaggtcacgcagaatgaaggcaccaagaccatcgccaataacctcaccagcaccatccaggtgtttacggactcggagtaccagctgccgtacgttctcggctctgcccaccagggctgcctgcctccgttcccggcggacgtgttcacgattccccagtacggctacctaacactcaacaacggtagtcaggccgtgggacgctcctccttctactgcctggaatactttccttcgcagatgctgagaaccggcaacaacttccagtttacttacaccttcgaggacgtgcctttccacagcagctacgcccacagccagagcttggaccggctgatgaatcctctgattgaccagtacctgtactacttgtctcggattcaaacaacaggaggcacggcaaatacgcagactctgggcttcagccaaggtgggcctaatacaatggccaatcaggcaaagaactggctgccaggaccctgttaccgccaacaacgcgtctcaacgacaaccgggcaaaacaacaatagcaactttgcctggactgctgggaccaaataccatctgaatggaagaaattcattggctaatcctggcatcgctatggcaacacacaaagacgacgaggagcgtttttttcccagtaacgggatcctgatttttggcaaacaaaatgctgccagagacaatgcggattacagcgatgtcatgcccaccagcgaggaagaaatcaaaaccactaaccctgtggccacagaggaatacggtatcgtggcagataacttgcagcagcaaaacacggctcctcaaattggaactgtcaacagccagggggccttacccggtatggtctggcagaaccgggacgtgtacctgcagggtcccatctgggccaagattcctcacacggacggcaacttccacccgtctccgctgatgggcggctttggcctgaaacatcctccgcctcagatcctgatcaagaacacgcctgtacctgcggatcctccgaccaccttcaaccagtcaaagctgaactctttcatcacgcaatacagcaccggacaggtcagcgtggaaattgaatgggagctgcagaaggaaaacagcaagcgctggaaccccgagatccagtacacctccaactactacaaatctacaagtgtggactttgctgttaatacagaaggcgtgtactctgaaccccgccccattggcacccgttacctcacccgtaatctgtaa

SEQ ID NO: 3881 - DNA, 2217 bp, Artificial Sequence
  source: /note="Description of Artificial Sequence: Synthetic polynucleotide"
atggctgccgatggttatcttccagattggctcgaggacaacctctctgagggcattcgcgagtggtgggcgctgaaacctggagccccgaagcccaaagccaaccagcaaaagcaggacgacggccggggtctggtgcttcctggctacaagtacctcggacccttcaacggactcgacaagggggagcccgtcaacgcggcggacgcggcggccctcgagcacgacaaggcctacgaccagcagctgcaggcgggtgacaatccgtacctgcggtataaccacgccgacgccgagtttcaggagcgtctgcaagaagatacgtcttttgggggcaacctcgggcgagcagtcttccaggccaagaagcgggttctcgaacctctcggtctggttgaggaaggcgctaagacggctcctggaaagaagagaccggtagagccatcaccccagcgttctccagactcctctacgggcatcggcaagaagggccaacagcccgccagaaaaagactcaattttggtcagactggcgactcagagtcagttccagaccctcaacctctcggagaacctccagcagcgccctctggtgtgggacctaatacaatggctgcaggcggtggcgcaccaatggcagacaataacgaaggcgccgacggagtgggtagttcctcgggaaattggcattgcgattccacatggctgggcgacagagtcatcaccaccagcacccgaacctgggccctgcccacctacaacaaccacctctacaagcaaatctccaacgggacatcgggaggagccaccaacgacaacacctacttcggctacagcaccccctgggggtattttgactttaacagattccactgccacttttcaccacgtgactggcagcgactcatcaacaacaactggggattccggcccaagagactcagcttcaagctcttcaacatccaggtcaaggaggtcacgcagaatgaaggcaccaagaccatcgccaataacctcaccagcaccatccaggtgtttacggactcggagtaccagctgccgtacgttctcggctctgcccaccagggctgcctgcctccgttcccggcggacgtgttcacgattccccagtacggctacctaacactcaacaacggtagtcaggccgtgggacgctcctccttctactgcctggaatactttccttcgcagatgctgagaaccggcaacaacttccagtttacttacaccttcgaggacgtgcctttccacagcagctacgcccacagccagagcttggaccggctgatgaatcctctgattgaccagtacctgtactacttgtctcggattcaaacaacaggaggcacggcaaatacgcagactctgggcttcagccaaggtgggcctaatacaatggccaatcaggcaaagaactggctgccaggaccctgttaccgccaacaacgcgtctcaacggcaaccgggcaaaacaacaatagcaactttgcctggactgctgggaccaaataccatctgaatggaagaaattcattggctaatcctggcatcgctatggcaacacacaaagacgacgaggagcgtttttttcccagtaacgggatcctgatttttggcaaacaaaatgctgccagagacaatgcggattacagcgatgtcatgcccaccagcgaggaagaaatcaaaaccactaaccctgtggccacagaggaatacggtatcgtggcagataacttgcagcagcaaaacacggctcctcaaattggaactgtcaacagccagggggccttacccggtatggtctggcagaaccgggacgtgtacctgcagggtcccatctgggccaagattcctcacacggacggcaacttccacccgtctccgctgatgggcggctttggcctgaaacatcctccgcctcagatcctgatcaagaacacgcctgtacctgcggatcctccgaccaccttcaaccagtcaaagctgaactctttcatcacgcaatacagcaccggacaggtcagcgtggaaattgaatgggagctgcagaaggaaaacagcaagcgctggaaccccgagatccagtacacctccaactactacaaatctacaagtgtggactttgctgttaatacagaaggcgtgtactctgaaccccgccccattggcacccgttacctcacccgtaatctgtaa

SEQ ID NO: 3882 - DNA, 2217 bp, Artificial Sequence
  source: /note="Description of Artificial Sequence: Synthetic polynucleotide"
atggctgccgatggttatcttccagattggctcgaggacaacctctctgagggcattcgcgagtggtgggcgctgaaacctggagccccgaagcccaaagccaaccagcaaaagcaggacgacggccggggtctggtgcttcctggctacaagtacctcggacccttcaacggactcgacaagggggagcccgtcaacgcggcggacgcggcggccctcgagcacgacaaggcctacgaccagcagctgcaggcgggtgacaatccgtacctgcggtataaccacgccgacgccgagtttcaggagcgtctgcaagaagatacgtcttttgggggcaacctcgggcgagcagtcttccaggccaagaagcgggttctcgaacctctcggtctggttgaggaaggcgctaagacggctcctggaaagaagagaccggtagagccatcaccccagcgttctccagactcctctacgggcatcggcaagaagggccaacagcccgccagaaaaagactcaattttggtcagactggcgactcagagtcagttccagaccctcaacctctcggagaacctccagcagcgccctctggtgtgggacctaatacaatggctgcaggcggtggcgcaccaatggcagacaataacgaaggcgccgacggagtgggtagttcctcgggaaattggcattgcgattccacatggctgggcgacagagtcatcaccaccagcacccgaacctgggccctgcccacctacaacaaccacctctacaagcaaatctccaacgggacatcgggaggagccaccaacgacaacacctacttcggctacagcaccccctgggggtattttgactttaacagattccactgccacttttcaccacgtgactggcagcgactcatcaacaacaactggggattccggcccaagagactcagcttcaagctcttcaacatccaggtcaaggaggtcacgcagaatgaaggcaccaagaccatcgccaataacctcaccagcaccatccaggtgtttacggactcggagtaccagctgccgtacgttctcggctctgcccaccagggctgcccgcctccgttcccggcggacgtgttcacgattccccagtacggctacctaacactcaacaacggtagtcaggccgtgggacgctcctccttctactgcctggaatactttccttcgcagatgctgagaaccggcaacaacttccagtttacttacaccttcgaggacgtgcctttccacagcagctacgcccacagccagagcttggaccggctgatgaatcctctgattgaccagtacctgtactacttgtctcggattcaaacaacaggaggcacggcaaatacgcagactctgggcttcagccaaggtgggcctaatacaatggccaatcaggcaaagaactggctgccaggaccctgttaccgccaacaacgcgtctcaacgacaaccgggcaaaacaacaatagcaactttgcctggactgctgggaccaaataccatctgaatggaagaaattcattggctaatcctggcatcgctatggcaacacacaaagacgacgaggagcgtttttttcccagtaacgggatcctgatttttggcaaacaaaatgctgccagagacaatgcggattacagcgatgtcatgcccaccagcgaggaagaaatcaaaaccactaaccctgtggccacagaggaatacggtatcgtggcagataacttgcagcagcaaaacacggctcctcaaattggaactgtcaacagccagggggccttacccggtatggtctggcagaaccgggacgtgtacctgcagggtcccatctgggccaagattcctcacacggacggcaacttccacccgtctccgctgatgggcggctttggcctgaaacatcctccgcctcagatcctgatcaagaacacgcctgtacctgcggatcctccgaccaccttcaaccagtcaaagctgaactctttcatcacgcaatacagcaccggacaggtcagcgtggaaattgaatgggagctgcagaaggaaaacagcaagcgctggaaccccgagatccagtacacctccaactactacaaatctacaagtgtggactttgctgttaatacagaaggcgtgtactctgaaccccgccccattggcacccgttacctcacccgtaatctgtaa

SEQ ID NO: 3883 - DNA, 2217 bp, Artificial Sequence
  source: /note="Description of Artificial Sequence: Synthetic polynucleotide"
atggctgccgatggttatcttccagattggctcgaggacaacctctctgagggcattcgcgagtggtgggcgctgaaacctggagccccgaagcccaaagccaaccagcaaaagcaggacgacggccggggtctggtgcttcctggctacaagtacctcggacccttcaacggactcgacaagggggagcccgtcaacgcggcggacgcggcggccctcgagcacgacaaggcctacgaccagcagccgcaggcgggtgacaatccgtacctgcggtataaccacgccgacgccgagtttcaggagcgtctgcaagaagatacgtcttttgggggcaacctcgggcgagcagtcttccaggccaagaagcgggttctcgaacctctcggtctggttgaggaaggcgctaagacggctcctggaaagaagagaccggtagagccatcaccccagcgttctccagactcctctacgggcatcggcaagaagggccaacagcccgccagaaaaagactcaattttggtcagactggcgactcagagtcagttccagaccctcaacctctcggagaacctccagcagcgccctctggtgtgggacctaatacaatggctgcaggcggtggcgcaccaatggcagacaataacgaaggcgccgacggagtgggtagttcctcgggaaattggcattgcgattccacatggctgggcgacagagtcatcaccaccagcacccgaacctgggccctgcccacctacaacaaccacctctacaagcaaatctccaacgggacatcgggaggagccaccaacgacaacacctacttcggctacagcaccccctgggggtattttgactttaacagattccactgccacttttcaccacgtgactggcagcgactcatcaacaacaactggggattccggcccaagagactcagcttcaagctcttcaacatccaggtcaaggaggtcacgcagaatgaaggcaccaagaccatcgccaataacctcaccagcaccatccaggtgtttacggactcggagtaccagctgccgtacgttctcggctctgcccaccagggctgcctgcctccgttcccggcggacgtgttcacgattccccagtacggctacctaacactcaacaacggtagtcaggccgtgggacgctcctccttctactgcctggaatactttccttcgcagatgctgagaaccggcaacaacttccagtttacttacaccttcgaggacgtgcctttccacagcagctacgcccacagccagagcttggaccggctgatgaatcctctgattgaccagtacctgtactacttgtctcggattcaaacaacaggaggcacggcaaatacgcagactctgggcttcagccaaggtgggcctaatacaatggccaatcaggcaaagaactggctgccaggaccctgttaccgccaacaacgcgtctcaacgacaaccgggcaaaacaacaatagcaactttgcctggactgctgggaccaaataccatctgaatggaagaaattcattggctaatcctggcatcgctatggcaacacacaaagacgacgaggagcgtttttttcccagtaacgggatcctgatttttggcaaacaaaatgctgccagagacaatgcggattacagcgatgtcatgcccaccagcgaggaagaaatcaaaaccactaaccctgtggccacagaggaatacggtatcgtggcagataacttgcagcagcaaaacacggctcctcaaattggaactgtcaacagccagggggccttacccggtatggtctggcagaaccgggacgtgtacctgcagggtcccatctgggccaagattcctcacacggacggcaacttccacccgtctccgctgatgggcggctttggcctgaaacatcctccgcctcagatcctgatcaagaacacgcctgtacctgcggatcctccgaccaccttcaaccagtcaaagctgaactctttcatcacgcaatacagcaccggacaggtcagcgtggaaattgaatgggagctgcagaaggaaaacagcaagcgctggaaccccgagatccagtacacctccaactactacaaatctacaagtgtggactttgctgttaatacagaaggcgtgtactctgaaccccgccccattggcacccgttacctcacccgtaatctgtaa

SEQ ID NO: 3884 - DNA, 2217 bp, Artificial Sequence
  source: /note="Description of Artificial Sequence: Synthetic polynucleotide"
atggctgccgatggttatcttccagattggctcgaggacaacctctctgagggcattcgcgagtggtgggcgctgaaacctggagccccgaagcccaaagccaaccagcaaaagcaggacgacggccggggtctggtgcttcctggctacaagtacctcggacccttcaacggactcgacaagggggagcccgtcaacgcggcggacgcggcggccctcgagcacgacaaggcctacgaccagcagctgcaggcgggtgacaatccgtacctgcggtataaccacgccgacgccgagtttcaggagcgtctgcaagaagatacgtcttttgggggcaacctcgggcgagcagtcttccaggccaagaagcgggttctcgaacctctcggtctggttgaggaaggcgctaagacggctcctggaaagaagagaccggtagagccatcaccccagcgttctccagactcctctacgggcatcggcaagaagggccaacagcccgccagaaaaagactcaattttggtcagactggcgactcagagtcagttccagaccctcaacctctcggagaacctccagcagcgccctctggtgtgggacctaatacaatggctgcaggcggtggcgcaccaatggcagacaataacgaaggcgccgacggagtgggtagttcctcgggaaattggcattgcgattccacatggctgggcgacagagtcatcaccaccagcacccgaacctgggccctgcccacctacaacaaccacctctacaagcaaatctccaacgggacatcgggaggagccaccaacgacaacacctacttcggctacagcaccccctgggggtattttgactttaacagattccactgccacttttcaccacgtgactggcagcgactcatcaacaacaactggggattccggcccaagagactcagcttcaagctcttcaacatccaggtcaaggaggtcacgcagaatgaaggcaccaagaccatcgccaataacctcaccagcaccatccaggtgtttacggactcggagtaccagctgccgtacgttctcggctctgcccaccagggctgcctgcctccgttcccggcggacgtgttcacgattccccagtacggctacctaacactcaacaacggtagtcaggccgtgggacgctcctccttctactgcctggaataccttccttcgcagatgctgagaaccggcaacaacttccagtttacttacaccttcgaggacgtgcctttccacagcagctacgcccacagccagagcttggaccggctgatgaatcctctgattgaccagtacctgtactacttgtctcggattcaaacaacaggaggcacggcaaatacgcagactctgggcttcagccaaggtgggcctaatacaatggccaatcaggcaaagaactggctgccaggaccctgttaccgccaacaacgcgtctcaacgacaaccgggcaaaacaacaatagcaactttgcctggactgctgggaccaaataccatctgaatggaagaaattcattggctaatcctggcatcgctatggcaacacacaaagacgacgaggagcgtttttttcccagtaacgggatcctgatttttggcaaacaaaatgctgccagagacaatgcggattacagcgatgtcatgcccaccagcgaggaagaaatcaaaaccactaaccctgtggccacagaggaatacggtatcgtggcagataacttgcagcagcaaaacacggctcctcaaattggaactgtcaacagccagggggccttacccggtatggtctggcagaaccgggacgtgtacctgcagggtcccatctgggccaagattcctcacacggacggcaacttccacccgtctccgctgatgggcggctttggcctgaaacatcctccgcctcagatcctgatcaagaacacgcctgtacctgcggatcctccgaccaccttcaaccagtcaaagctgaactctttcatcacgcaatacagcaccggacaggtcagcgtggaaattgaatgggagctgcagaaggaaaacagcaagcgctggaaccccgagatccagtacacctccaactactacaaatctacaagtgtggactttgctgttaatacagaaggcgtgtactctgaaccccgccccattggcacccgttacctcacccgtaatctgtaa

SEQ ID NO: 3885 - DNA, 2217 bp, Artificial Sequence
  source: /note="Description of Artificial Sequence: Synthetic polynucleotide"
atggctgccgatggttatcttccagattggctcgaggacaacctctctgagggcattcgcgagtggtgggcgctgaaacctggagccccgaagcccaaagccaaccagcaaaagcaggacgacggccggggtctggtgcttcctggctacaagtacctcggacccttcaacggactcgacaagggggagcccgtcaacgcggcggacgcggcggccctcgagcacgacaaggcctacgaccagcagctgcgggcgggtgacaatccgtacctgcggtataaccacgccgacgccgagtttcaggagcgtctgcaagaagatacgtcttttgggggcaacctcgggcgagcagtcttccaggccaagaagcgggttctcgaacctctcggtctggttgaggaaggcgctaagacggctcctggaaagaagagaccggtagagccatcaccccagcgttctccagactcctctacgggcatcggcaagaaggaccaacagcccgccagaaaaagactcaattttggtcagactggcgactcagagtcagttccagaccctcaacctctcggagaacctccagcagcgccctctggtgtgggacctaatacaatggctgcaggcggtggcgcaccaatggcagacaataacgaaggcgccgacggagtgggtagttcctcgggaaattggcattgcgattccacatggctgggcgacagagtcatcaccaccagcacccgaacctgggccctgcccacctacaacaaccacctctacaagcaaatctccaacgggacatcgggaggagccaccaacgacaacacctacttcggctacagcaccccctgggggtattttgactttaacagattccactgccacttttcaccacgtgactggcagcgactcatcaacaacaactggggattccggcccaagagactcagcttcaagctcttcaacatccaggtcaaggaggtcacgcagaatgaaggcaccaagaccatcgccaataacctcaccagcaccatccaggtgtttacggactcggagtaccagctgccgtacgttctcggctctgcccaccagggctgcctgcctccgttcccggcggacgtgttcacgattccccagtacggctacctaacactcaacaacggtagtcaggccgtgggacgctcctccttctactgcctggaatactttccttcgcagatgctgagaaccggcaacaacttccagtttacttacaccttcgaggacgtgcctttccacagcagctacgcccacagccagagcttggaccggctgatgaatcctctgattgaccagtacctgtactacttgtctcggattcaaacaacaggaggcacggcaaatacgcagactctgggcttcagccaaggtgggcctaatacaatggccaatcaggcaaagaactggctgccaggaccctgttaccgccaacaacgcgtctcaacgacaaccgggcaaaacaacaatagcaactttgcctggactgctgggaccaaataccatctgaatggaagaaattcattggctaatcctggcatcgctatggcaacacacaaagacgacgaggagcgtttttttcccagtaacgggatcctgatttttggcaaacaaaatgctgccagagacaatgcggattacagcgatgtcatgcccaccagcgaggaagaaatcaaaaccactaaccctgtggccacagaggaatacggtatcgtggcagataacttgcagcagcaaaacacggctcctcaaattggaactgtcaacagccagggggccttacccggtatggtctggcagaaccgggacgtgtacctgcagggtcccatctgggccaagattcctcacacggacggcaacttccacccgtctccgctgatgggcggctttggcctgaaacatcctccgcctcagatcctgatcaagaacacgcctgtacctgcggatcctccgaccaccttcaaccagtcaaagctgaactctttcatcacgcaatacagcaccggacaggtcagcgtggaaattgaatgggagctgcagaaggaaaacagcaagcgctggaaccccgagatccagtacacctccaactactacaaatctacaagtgtggactttgctgttaatacagaaggcgtgtactctgaaccccgccccattggcacccgttacctcacccgtaatctgtaa

SEQ ID NO: 3886 - DNA, 2217 bp, Artificial Sequence
  source: /note="Description of Artificial Sequence: Synthetic polynucleotide"
atggctgccgatggttatcttccagattggctcgaggacaacctctctgagggcattcgcgagtggtgggcgctgaaacctggagccccgaagcccaaagccaaccagcaaaagcaggacgacggccggggtctggtgcttcctggctacaagtacctcggacccttcaacggactcgacaagggggagcccgtcaacgcggcggacgcggcggccctcgagcacgacaaggcctacgaccagcagctgcaggcgggtgacaatccgtacctgcggtataaccacgccgacgccgagtttcaggagcgtctgcaagaagatacgtcttttgggggcaacctcgggcgagcagtcttccaggccaagaagcgggttctcgaacctctcggtctggttgaggaaggcgctaagacggctcctggaaagaagagaccggtagagccatcaccccagcgttctccagactcctctacgggcatcggcaagaagggccaacagcccgccagaaaaagactcaattttggtcagactggcgactcagagtcagttccagaccctcaacctctcggagaacctccagcagcgccctctggtgtgggacctaatacaatggctgcaggcggtggcgcaccaatggcagacaataacgaaggcgccgacggagtgggtagttcctcgggaaattggcattgcgattccacatggctgggcgacagagtcatcaccaccagcacccgaacctgggccctgcccacctacaacaaccacctctacaagcaaatctccaacgggacatcgggaggagccaccaacgacaacacctacttcggctacagcaccccctgggggtattttgactttaacagattccactgccacttttcaccacgtgactggcagcgactcatcaacaacaactggggattccggcccaagagactcagcttcaagctcttcaacatccaggtcaaggaggtcacgcagaatgaaggcaccaagaccatcgccaataacctcaccagcaccatccaggtgtttacggactcggagtaccagctgccgtacgttctcggctctgcccaccagggctgcctgcctccgttcccggcggacgtgttcacgattccccagtacggctacctaacactcaacaacggtagtcaggccgtgggacgctcctccttctactgcctggaatactttccttcgcagatgctgagaaccggcaacaacttccagtttacttacaccttcgaggacgtgcctttccacagcagctacgcccacagccagagcttggaccggctgatgaatcctctgattgaccagtacctgtactacttgtctcggattcaaacaacaggaggcacggcaaatacgcagactctgggcttcagccaaggtgggcctaatacaatggccaatcaggcaaagaactggctgccaggaccctgttaccgccaacaacgcgtctcaacgacaaccgggcaaaacaacaatagcaactttgcctggactgctgggaccaaataccatctgaatggaagaaattcattggctaatcctggcatcgctatggcaacacacaaagacgacgaggagcgtttttttcccagtaacgggatcctgatttttggcaaacaaaatgctgccagagacaatgcggattacagcgatgtcatgcccaccagcgaggaagaaatcaaaaccactaaccctgtggccacagaggaatacggtatcgtggcagataacttgcagcagcaaaacacggctcctcaaattggaactgtcaacagccagggggccttacccggtatggtctggcagaaccgggacgtgtacctgcagggtcccatctgggccaagattcctcgcacggacggcaacttccacccgtctccgctgatgggcggctttggcctgaaacatcctccgcctcagatcctgatcaagaacacgcctgtgcctgcggatcctccgaccaccttcaaccagtcaaagctgaactctttcatcacgcaatacagcaccggacaggtcagcgtggaaattgaatgggagctgcagaaggaaaacagcaagcgctggaaccccgagatccagtacacctccaactactacaaatctacaagtgtggactttgctgttaatacagaaggcgtgtactctgaaccccgccccattggcacccgttacctcacccgtaatctgtaa

SEQ ID NO: 3887 - DNA, 2217 bp, Artificial Sequence
  source: /note="Description of Artificial Sequence: Synthetic polynucleotide"
atggctgccgatggttatcttccagattggctcgaggacaacctctctgagggcattcgcgagtggtgggcgctgaaacctggagccccgaagcccaaagccaaccagcaaaagcaggacgacggccggggtctggtgcttcctggctacaagtacctcggacccttcaacggactcgacaagggggagcccgtcaacgcggcggacgcggcggccctcgagcacgacaaggcctacgaccagcagctgcaggcgggtgacaatccgtacctgcggtataaccacgccgacgccgagtttcaggagcgtctgcaagaagatacgtcttttgggggcaacctcgggcgagcagtcttccaggccaagaagcgggttctcgaacctctcggtctggttgaggaaggcgctaagacggctcctggaaagaagagaccggtagagccatcaccccagcgttctccagactcctctacgggcatcggcaagaagggccaacagcccgccagaaaaagactcaattttggtcagactggcgactcagagtcagttccagaccctcaacctctcggagaacctccagcagcgccctctggtgtgggacctaatacaatggctgcaggcggtggcgcaccaatggcagacaataacgaaggcgccgacggagtgggtagttcctcgggaaattggcattgcgattccacatggctgggcgacagagtcatcaccaccagcacccgaacctgggccctgcccacctacaacaaccacctctacaagcaaatctccaacgggacatcgggaggagccaccaacgacaacacctacttcggctacagcaccccctgggggtattttgactttaacagattccactgccacttttcaccacgtgactggcagcgactcatcaacaacaactggggattccggcccaagagactcagcttcaagctcttcaacatccaggtcaaggaggtcacgcagaatgaaggcaccaagaccatcgccaataacctcaccagcaccatccaggtgtttacggactcggagtaccagctgccgtacgttctcggctctgcccaccagggctgcctgcctccgttcccggcggacgtgttcacgattccccagtacggctacctaacactcaacaacggtagtcaggccgtgggacgctcctccttctactgcctggaatactttccttcgcagatgctgagaaccggcaacaacttccagtttacttacaccttcgaggacgtgcctttccacagcagctacgcccacagccagagcttggaccggctgatgaatcctctgattgaccagtacctgtactacttgtctcggattcaaacaacaggaggcacggcaaatacgcagactctgggcttcagccaaggtgggcctaatacaatggccaatcaggcaaagaactggctgccaggaccctgttaccgccaacaacgcgtctcaacgacaaccgggcaaaacaacaatagcaactttgcctggactgctgggaccaaataccatctgaatggaagaaattcattggctaatcctggcatcgctatggcaacacacaaagacgacgaggagcgtttttttcccagtaacgggatcctgatttttggcaaacaaaatgctgccagagacaatgcggattacagcgatgtcatgcccaccagcgaggaagaaatcaaaaccactaaccctgtggccacagaggaatacggtatcgtggcagataacttgcagcagcaaaacacggctcctcaaattggaactgtcaacagccagggggccttacccggtatggtctggcagaaccgggacgtgtacctgcagggtcccatctgggccaagattcctcacacggacggcaacttccacccgtctccgctgatgggcggctttggcctgaaacatcctccgcctcagatcctgatcaagaacacgcctgtacctgcggatcctccgaccaccttcaaccagtcaaagctgaactctttcatcacgcaatacagcaccggacaggtcagcgtggaaattggatgggagctgcagaaggaaaacagcaagcgctggaaccccgagatccagtacacctccaactactacaaatctacaagtgtggactttgctgttaatacagaaggcgtgtactctgaaccccgccccattggcacccgttacctcacccgtaatctgtaa

SEQ ID NO: 3888 - DNA, 2217 bp, Artificial Sequence
  source: /note="Description of Artificial Sequence: Synthetic polynucleotide"
atggctgccgatggttatcttccagattggctcgaggacaacctctctgagggcattcgcgagtggtgggcgctgaaacctggagccccgaagcccaaagccaaccagcaaaagcaggacgacggccggggtctggtgcttcctggctacaagtacctcggacccttcaacggactcgacaagggggagcccgtcaacgcggcggacgcggcggccctcgagcacgacaaggcctacgaccagcagctgcaggcgggtgacaatccgtacctgcggtataaccacgccgacgccgagtttcaggagcgtctgcaagaagatacgtcttttgggggcaacctcgggcgagcagtcttccaggccaagaagcgggttctcgaacctctcggtctggttgaggaaggcgctaagacggctcctggaaagaagagaccggtagagccatcaccccagcgttctccagactcctctacgggcatcggcaagaagggccaacagcccgccagaaaaagactcaattttggtcagactggcgactcagagtcagttccagaccctcaacctctcggagaacctccagcagcgccctctggtgtgggacctaatacaatggctacaggcggtggcgcaccaatggcagacaataacgaaggcgccgacggagtgggtagttcctcgggaaattggcattgcgattccacatggctgggcgacagagtcatcaccaccagcacccgaacctgggccctgcccacctacaacaaccacctctacaagcaaatctccaacgggacatcgggaggagccaccaacgacaacacctacttcggctacagcaccccctgggggtattttgactttaacagattccactgccacttttcaccacgtgactggcagcgactcatcaacaacaactggggattccggcccaagagactcagcttcaagctcttcaacatccaggtcaaggaggtcacgcagaatgaaggcaccaagaccatcgccaataacctcaccagcaccatccaggtgtttacggactcggagtaccagctgccgtacgttctcggctctgcccaccagggctgcctgcctccgttcccggcggacgtgttcacgattccccagtacggctacctaacactcaacaacggtagtcaggccgtgggacgctcctccttctactgcctggaatactttccttcgcagatgctgagaaccggcaacaacttccagtttacttacaccttcgaggacgtgcctttccacggcagctacgcccacagccagagcttggaccggctgatgaatcctctgattgaccagtacctgtactacttgtctcggattcaaacaacaggaggcacggcaaatacgcagactctgggcttcagccaaggtgggcctaatacaatggccaatcaggcaaagaactggctgccaggaccctgttaccgccaacaacgcgtctcaacgacaaccgggcaaaacaacaatagcaactttgcctggactgctgggaccaaataccatctgaatggaagaaattcattggctaatcctggcatcgctatggcaacacacaaagacgacgaggagcgtttttttcccagtaacgggatcctgatttttggcaaacaaaatgctgccagagacaatgcggattacagcgatgtcatgcccaccagcgaggaagaaatcaaaaccactaaccctgtggccacagaggaatacggtatcgtggcagataacttgcagcagcaaaacacggctcctcaaattggaactgtcaacagccagggggccttacccggtatggtctggcagaaccgggacgtgtacctgcagggtcccatctgggccaagattcctcacacggacggcaacttccacccgtctccgctgatgggcggctttggcctgaaacatcctccgcctcagatcctgatcaagaacacgcctgtacctgcggatcctccgaccaccttcaaccagtcaaagctgaactctttcatcacgcaatacagcaccggacaggtcagcgtggaaattgaatgggagctgcagaaggaaaacagcaagcgctggaaccccgagatccagtacacctccaactactacaaatctacaagtgtggactttgctgttaatacagaaggcgtgtactctgaaccccgccccattggcacccgttacctcacccgtaatctgtaa

SEQ ID NO: 3889 - DNA, 2217 bp, Artificial Sequence
  source: /note="Description of Artificial Sequence: Synthetic polynucleotide"
atggctgccgatggttatcttccagattggctcgaggacaacctctctgagggcattcgcgagtggtgggcgctgaaacctggagccccgaagcccaaagccaaccagcaaaagcaggacgacggccggggtctggtgcttcctggctacaagtacctcggacccttcaacggactcgacaagggggagcccgtcaacgcggcggacgcggcggccctcgagcacgacaaggcctacgaccagcagctgcaggcgggtgacaatccgtacctgcggtataaccacgccgacgccgagtttcaggagcgtctgcaagaagatacgtcttttgggggcaacctcgggcgagcagtcttccaggccaagaagcgggttctcgaacctctcggtctggttgaggaaggcgctaagacggctcctggaaagaagagaccggtagagccatcaccccagcgttctccagactcctctacgggcatcggcaagaagggccaacagcccgccagaaaaagactcaattttggtcagactggcgactcagagtcagttccagaccctcaacctctcggagaacctccagcagcgccctctggtgtgggacctaatacaatggctgcaggcggtggcgcaccaatggcagacaataacgaaggcgccgacggagtgggtagttcctcgggaaattggcattgcgattccacatggctgggcgacagagtcatcaccaccagcacccgaacctgggccctgcccacctacaacaaccacctctacaagcaaatctccaacgggacatcgggaggagccaccaacgacaacacctacttcggctacagcaccccctgggggtattttgactttaacagattccactgccacttttcaccacgtgactggcagcgactcatcaacaacaactggggattccggcccaagagactcagcttcaagctcttcaacatccaggtcaaggaggtcacgcagaatgaaggcaccaagaccatcgccaataacctcaccagcaccatccaggtgtttacggactcggagtacctgctgccgtacgttctcggctctgcccaccagggctgcctgcctccgttcccggcggacgtgttcacgattccccagtacggctacctaacactcaacaacggtagtcaggccgtgggacgctcctccttctactgcctggaatactttccttcgcagatgctgagaaccggcaacaacttccagtttacttacaccttcgaggacgtgcctttccacagcagctacgcccacagccagagcttggaccggctgatgaatcctctgattgaccagtacctgtactacttgtctcggattcaaacaacaggaggcacggcaaatacgcagactctgggcttcagccaaggtgggcctaatacaatggccaatcaggcaaagaactggctgccaggaccctgttaccgccaacaacgcgtctcaacgacaaccgggcaaaacaacaatagcaactttgcctggactgctgggaccaaataccatctgaatggaagaaattcattggctaatcctggcatcgctatggcaacacacaaagacgacgaggagcgtttttttcccagtaacgggatcctgatttttggcaaacaaaatgctgccagagacaatgcggattacagcgatgtcatgcccaccagcgaggaagaaatcaaaaccactaaccctgtggccacagaggaatacggtatcgtggcagataacttgcagcagcaaaacacggctcctcaaattggaactgtcaacagccagggggccttacccggtatggtctggcagaaccgggacgtgtacctgcagggtcccatctgggccaagattcctcacacggacggcaacttccacccgtctccgctgatgggcggctttggcctgaaacatcctccgcctcagatcctgatcaagaacacgcctgtacctgcggatcctccgaccaccttcaaccagtcaaagctgaactctttcatcacgcaatacagcaccggacaggtcagcgtggaaattgaatgggagctgcagaaggaaaacagcaagcgctggaaccccgagatccagtacacctccaactactacaaatctacaagtgtggactttgctgttaatacagaaggcgtgtactctgaaccccgccccattggcacccgttacctcacccgtaatctgtaa

SEQ ID NO: 3890 - DNA, 2217 bp, Artificial Sequence
  source: /note="Description of Artificial Sequence: Synthetic polynucleotide"
atggctgccgatggttatcctccagattggctcgaggacaacctctctgagggcattcgcgagtggtgggcgctgaaacctggagccccgaagcccaaagccaaccagcaaaagcaggacgacggccggggtctggtgcttcctggctacaagtacctcggacccttcaacggactcgacaagggggagcccgtcaacgcggcggacgcggcggccctcgagcacgacaaggcctacgaccagcagctgcaggcgggtgacaatccgtacctgcggtataaccacgccgacgccgagtttcaggagcgtctgcaagaagatacgtcttttgggggcaacctcgggcgagcagtcttccaggccaagaagcgggttctcgaacctctcggtctggttgaggaaggcgctaagacggctcctggaaagaagagaccggtagagccatcaccccagcgttctccagactcctctacgggcatcggcaagaagggccaacagcccgccagaaaaagactcaattttggtcagactggcgactcagagtcagttccagaccctcaacctctcggagaacctccagcagcgccctctggtgtgggacctaatacaatggctgcaggcggtggcgcaccaatggcagacaataacgaaggcgccgacggagtgggtagttcctcgggaaattggcattgcgattccacatggctgggcgacagagtcatcaccaccagcacccgaacctgggccctgcccacctacaacaaccacctctacaagcaaatctccaacgggacatcgggaggagccaccaacgacaacacctacttcggctacagcaccccctgggggtattttgactttaacagattccactgccacttttcaccacgtgactggcagcgactcatcaacaacaactggggattccggcccaagagactcagcttcaagctcttcaacatccaggtcaaggaggtcacgcagaatgaaggcaccaagaccatcgccaataacctcaccagcaccatccaggtgtttacggactcggagtaccagctgccgtacgttctcggctctgcccaccagggctgcctgcctccgttcccggcggacgtgttcacgattccccagtacggctacctaacactcaacaacggtagtcaggccgtgggacgctcctccttctactgcctggaatactttccttcgcagatgctgagaaccggcaacaacttccagtttacttacaccttcgaggacgtgcctttccacagcagctacgcccacagccagagcttggaccggctgatgaatcctctgattgaccagtacctgtactacttgtctcggattcaaacaacaggaggcacggcaaatacgcagactctgggcttcagccaaggtgggcctaatacaatggccaatcaggcaaagaactggctgccaggaccctgttaccgccaacaacgcgtctcaacgacaaccgggcaaaacaacaatagcaactttgcctggactgctgggaccaaataccatctgaatggaagaaattcattggctaatcctggcatcgctatggcaacacacaaagacgacgaggagcgtttttttcccagtaacgggatcctgatttttggcaaacaaaatgctgccagagacaatgcggattacagcgatgtcatgcccaccagcgaggaagaaatcaaaaccactaaccctgtggccacagaggaatacggtatcgtggcagataacttgcagcagcaaaacacggctcctcaaattggaactgtcaacagccagggggccttacccggtatggtctggcagaaccgggacgtgtacctgcagggtcccatctgggccaagattcctcacacggacggcaacttccacccgtctccgctgatgggcggctttggcctgaaacatcctccgcctcagatcctgatcaagaacacgcctgtacctgcggatcctccgaccaccttcaaccagtcaaagctgaactctttcatcacgcaatacagcaccggacaggtcagcgtggaaattgaatgggagctgcagaaggaaaacagcaagcgctggaaccccgagatccagtacacctccaactactacaaatctacaagtgtggactttgctgttaatacagaaggcgtgtactctgaaccccgccccattggcacccgttacctcacccgtaatctgtaa

SEQ ID NO: 3891 - DNA, 2217 bp, Artificial Sequence
  source: /note="Description of Artificial Sequence: Synthetic polynucleotide"
atggctgccgatggttatcttccagattggctcgaggacaacctctctgagggcattcgcgagtggtgggcgctgaaacctggagccccgaagcccaaagccaaccagcaaaagcaggacgacggccggggtctggtgcttcctggctacaagtacctcggacccttcaacggactcgacaagggggagcccgtcaacgcggcggacgcggcggccctcgagcacgacaaggcctacgaccagcagctgcaggcgggtgacaatccgtacctgcggtataaccacgccgacgccgagtttcaggagcgtctgcaagaagatacgtcttttgggggcaacctcgggcgagcagtcttccaggccaagaagcgggttctcgaacctctcggtctggttgaggaaggcgctaagacggctcctggaaagaagagaccggtagagccatcaccccagcgttctccagactcctctacgggcatcggcaagaagggccaacagcccgccagaaaaagactcaattttggtcagactggcgactcagagtcagttccagaccctcaacctctcggagaacctccagcagcgccctctggtgtgggacctaatacaatggctgcaggcggtggcgcaccaatggcagacaataacgaaggcgccgacggagtgggtagttcctcgggaaattggcattgcgattccacatggctgggcgacagagtcatcaccaccagcacccgaacctgggccctgcccacctacaacaaccacctctacaagcaaatctccaacgggacatcgggaggagccaccaacgacaacacctacttcggctacagcaccccctgggggtattttgactttaacagattccactgccacttttcaccacgtgactggcagcgactcatcaacaacaactggggattccggcccaagagactcagcttcaagctcttcaacatccaggtcaaggaggtcacgcagaatgaaggcaccaagaccatcgccaataacctcaccagcaccatccaggtgtttacggactcggagtaccagctgccgtacgttctcggctctgcccaccagggctgcctgcctccgttcccggcggacgtgttcacgattccccagtacggctacctaacactcaacaacggtagtcaggccgtgggacgctcctccttctactgcctggaatactttccttcgcagatgctgagaaccggcaacaacttccagtttacttacaccttcgaggacgtgcctttccacagcagctacgcccacagccagagcttggaccggctgatgaatcctctgattgaccagtacctgtactacttgtctcggattcaaacaacaggaggcacggcaaatacgcagactctgggctccagccaaggtgggcctaatacaatggccaatcaggcaaagaactggctgccaggaccctgttaccgccaacaacgcgtctcaacgacaaccgggcaaaacaacaatagcaactttgcctggactgctgggaccaaataccatctgaatggaagaaattcattggctaatcctggcatcgctatggcaacacacaaagacgacgaggagcgtttttttcccagtaacgggatcctgatttttggcaaacaaaatgctgccagagacaatgcggattacagcgatgtcatgcccaccagcgaggaagaaatcaaaaccactaaccctgtggccacagaggaatacggtatcgtggcagataacttgcagcagcaaaacacggctcctcaaattggaactgtcaacagccagggggccttacccggtatggtctggcagaaccgggacgtgtacctgcagggtcccatctgggccaagattcctcacacggacggcaacttccacccgtctccgctgatgggcggctttggcctgaaacatcctccgcctcagatcctgatcaagaacacgcctgtacctgcggatcctccgaccaccttcaaccagtcaaagctgaactctttcatcacgcaatacagcaccggacaggtcagcgtggaaattgaatgggagctgcagaaggaaaacagcaagcgctggaaccccgagatccagtacacctccaactactacaaatctacaagtgtggactttgctgttaatacagaaggcgtgtactctgaaccccgccccattggcacccgttacctcacccgtaatctgtaa

SEQ ID NO: 3892 - DNA, 2217 bp, Artificial Sequence
  source: /note="Description of Artificial Sequence: Synthetic polynucleotide"
atggctgccgatggttatcttccagattggctcgaggacaacctctctgagggcattcgcgagtggtgggcgctgaaacctggagccccgaagcccaaagccaaccagcaaaagcaggacgacggccggggtctggtgcttcctggctacaagtacctcggacccttcaacggactcgacaagggggagcccgtcaacgcggcggacgcggcggccctcgagcacgacaaggcctacgaccagcagctgcaggcgggtgacaatccgtacctgcggtataaccacgccgacgccgagtttcaggagcgtctgcaagaagatacgtcttttgggggcaacctcgggcgagcagtcttccaggccaagaagcgggttctcgaacctctcggtctggttgaggaaggcgctaagacggctcctggaaagaagagaccggtagagccatcaccccagcgttctccagactcctctacgggcatcggcaagaagggccaacagcccgccagaaaaagactcaattttggtcagactggcgactcagagtcagttccagaccctcaacctctcggagaacctccagcagcgccctctggtgtgggacctaatacaatggctgcaggcggtggcgcaccaatggcagacaataacgaaggcgccgacggagtgggtagttcctcgggaaattggcattgcgattccacatggctgggcgacagagtcatcaccaccagcacccgaacctgggccctgcccacctacaacaaccacctctacaagcaaatctccaacgggacatcgggaggagccaccaacgacaacacctacttcggctacagcaccccctgggggtattttgactttaacagattccactgccacttttcaccacgtgactggcagcgactcatcaacaacaactggggattccggcccaagagactcagcttcaagctcttcaacatccaggtcaaggaggtcacgcagaatgaaggcaccaagaccatcgccaataacctcaccagcaccatccaggtgtttacggactcggagtaccagctgccgtacgttctcggctctgcccaccagggctgcctgcctccgttcccggcggacgtgttcacgattccccagtacggctacctaacactcaacaacggtagtcaggccgtgggacgctcctccttctactgcctggaatactttccttcgcagatgctgagaaccggcaacaacttccagtttacttacaccttcgaggacgtgcctttccacagcagctacgcccacagccagagcttggaccggctgatgaatcctctgattggccagtacctgtactacttgtctcggattcaaacaacaggaggcacggcaaatacgcagactctgggcttcagccaaggtgggcctaatacaatggccaatcaggcaaagaactggctgccaggaccctgttaccgccaacaacgcgtctcaacgacaaccgggcaaaacaacaatagcaactttgcctggactgctgggaccaaataccatctgaatggaagaaattcattggctaatcctggcatcgctatggcaacacacaaagacgacgaggagcgtttttttcccagtaacgggatcctgatttttggcaaacaaaatgctgccagagacaatgcggattacagcgatgtcatgcccaccagcgaggaagaaatcaaaaccactaaccctgtggccacagaggaatacggtatcgtggcagataacttgcagcagcaaaacacggctcctcaaattggaactgtcaacagccagggggccttacccggtatggtctggcagaaccgggacgtgtacctgcagggtcccatctgggccaagattcctcacacggacggcaacttccacccgtctccgctgatgggcggctttggcctgaaacatcctccgcctcagatcctgatcaagaacacgcctgtacctgcggatcctccgaccaccttcaaccagtcaaagctgaactctttcatcacgcaatacagcaccggacaggtcagcgtggaaattgaatgggagctgcagaaggaaaacagcaagcgctggaaccccgagatccagtacacctccaactactacaaatctacaagtgtggactttgctgttaatacagaaggcgtgtactctgaaccccgccccattggcacccgttacctcacccgtaatctgtaa

SEQ ID NO: 3893 - DNA, 2217 bp, Artificial Sequence
  source: /note="Description of Artificial Sequence: Synthetic polynucleotide"
atggctgccgatggttatcttccagattggctcgaggacaacctctctgagggcattcgcgagtggtgggcgctgaaacctggagccccgaagcccaaagccaaccagcaaaagcaggacgacggccggggtctggtgcttcctggctacaagtacctcggacccttcaacggactcgacaagggggagcccgtcaacgcggcggacgcggcggccctcgagcacgacaaggcctacgaccagcagctgcaggcgggtgacaatccgtacctgcggtataaccacgccgacgccgagtttcaggagcgtctgcaagaagatacgtcttttgggggcaacctcgggcgagcagtcttccaggccaagaagcgggttctcgaacctctcggtctggttgaggaaggcgctaagacggctcctggaaagaagagaccggtagagccatcaccccagcgttctccagactcctctacgggcatcggcaagaagggccaacagcccgccagaaaaagactcaattttggtcagactggcgactcagagtcagttccagaccctcaacctctcggagaacctccagcagcgccctctggtgtgggacctaatacaatggctgcaggcggtggcgcaccaatggcagacaataacgaaggcgccgacggagtgggtagttcctcgggaaattggcattgcgattccacatggctgggcgacagagtcatcaccaccagcacccgaacctgggccctgcccacctacaacaaccacctctacaagcaaatctccaacgggacatcgggaggagccaccaacgacaacacctacttcggctacagcaccccctgggggtattttgactttaacagattccactgccacttttcaccacgtgactggcagcgactcatcaacaacaactggggattccggcccaagagacccagcttcaagctcttcaacatccaggtcaaggaggtcacgcagaatgaaggcaccaagaccatcgccaataacctcaccagcaccatccaggtgtttacggactcggagtaccagctgccgtacgttctcggctctgcccaccagggctgcctgcctccgttcccggcggacgtgttcacgattccccagtacggctacctaacactcaacaacggtagtcaggccgtgggacgctcctccttctactgcctggaatactttccttcgcagatgctgagaaccggcaacaacttccagtttacttacaccttcgaggacgtgcctttccacagcagctacgcccacagccagagcttggaccggctgatgaatcctctgattgaccagtacctgtactacttgtctcggattcaaacaacaggaggcacggcaaatacgcagactctgggcttcagccaaggtgggcctaatacaatggccaatcaggcaaagaactggctgccaggaccctgttaccgccaacaacgcgtctcaacgacaaccgggcaaaacaacaatagcaactttgcctggactgctgggaccaaataccatctgaatggaagaaattcattggctaatcctggcatcgctatggcaacacacaaagacgacgaggagcgtttttttcccagtaacgggatcctgatttttggcaaacaaaatgctgccagagacaatgcggattacagcgatgtcatgcccaccagcgaggaagaaatcaaaaccactaaccctgtggccacagaggaatacggtatcgtggcagataacttgcagcagcaaaacacggctcctcaaattggaactgtcaacagccagggggccttacccggtatggtctggcagaaccgggacgtgtacctgcagggtcccatctgggccaagattcctcacacggacggcaacttccacccgtctccgctgatgggcggctttggcctgaaacatcctccgcctcagatcctgatcaagaacacgcctgtacctgcggatcctccgaccaccttcaaccagtcaaagctgaactctttcatcacgcaatacagcaccggacaggtcagcgtggaaattgaatgggagctgcagaaggaaaacagcaagcgctggaaccccgagatccagtacacctccaactactacaaatctacaagtgtggactttgctgttaatacagaaggcgtgtactctgaaccccgccccattggcacccgttacctcacccgtaatctgtaa

SEQ ID NO: 3894 - DNA, 2217 bp, Artificial Sequence
  source: /note="Description of Artificial Sequence: Synthetic polynucleotide"
atggctgccgatggttatcttccagattggctcgaggacaacctctctgagggcattcgcgagtggtgggcgctgaaacctggagccccgaagcccaaagccaaccagcaaaagcaggacgacggccggggtctggtgcttcctggctacaagtacctcggacccttcaacggactcgacaagggggagcccgtcaacgcggcggacgcggcggccctcgagcacgacaaggcctacgaccagcagctgcaggcgggtgacaatccgtacctgcggtataaccacgccgacgccgagtttcaggagcgtctgcaagaagatacgtcttttgggggcaacctcgggcgagcagtcttccaggccaagaagcgggttctcgaacctctcggtctggttgaggaaggcgctaagacggctcctggaaagaagagaccggtagagccatcaccccagcgttctccagactcctctacgggcatcggcaagaagggccaacagcccgccagaaaaagactcaattttggtcagactggcgactcagagtcagttccagaccctcaacctctcggagaacctccagcagcgccctctggtgtgggacctaatacaatggctgcaggcggtggcgcaccaatggcagacaataacgaaggcgccgacggagtgggtagttcctcgggaaattggcattgcgattccacatggctgggcgacagagtcatcaccaccagcacccgaacctgggccctgcccacctacaacaaccacctctacaagcaaatctccaacgggacatcgggaggagccaccaacgacaacacctacttcggctacagcaccccctgggggtattttgactttaacagattccactgccacttttcaccacgtgactggcagcgactcatcaacaacaactggggattccggcccaagagactcagcttcaagctcttcaacatccaggtcaaggaggtcacgcagaatgaaggcaccaagaccatcgccaataacctcaccagcaccatccaggtgtttacggactcggagtaccagctgccgtacgttctcggctctgcccaccagggctgcctgcctccgttcccggcggacgtgttcacgattccccagtacggctacctaacactcaacaacggtagtcaggccgtgggacgctcctccttctactgcctggaatactttccttcgcagatgctgagaaccggcaacaacttccagtttacttacaccttcgaggacgtgcctttccacagcagctacgcccacagccagagcttggaccggctgatgaatcctctgattgaccagtacctgtactacttgtctcggattcaaacaacaggaggcacggcaaatacgcagactctgggcttcagccaaggtgggcctaatacaatggccaatcaggcaaagaactggctgccaggaccctgttaccgccaacaacgcgtctcaacgacaaccgggcaaaacaacaatagcaactttgcctggactgctgggaccaaataccatctgaatggaagaaattcattggctaatcctggcatcgctatggcaacacacaaagacgacggggagcgtttttttcccagtaacgggatcctgatttttggcaaacaaaatgctgccagagacaatgcggattacagcgatgtcatgcccaccagcgaggaagaaatcaaaaccactaaccctgtggccacagaggaatacggtatcgtggcagataacttgcagcagcaaaacacggctcctcaaattggaactgtcaacagccagggggccttacccggtatggtctggcagaaccgggacgtgtacctgcagggtcccatctgggccaagattcctcacacggacggcaacttccacccgtctccgctgatgggcggctttggcctgaaacatcctccgcctcagatcctgatcaagaacacgcctgtacctgcggatcctccgaccaccttcaaccagtcaaagctgaactctttcatcacgcaatacagcaccggacaggtcagcgtggaaattgaatgggagctgcagaaggaaaacagcaagcgctggaaccccgagatccagtacacctccaactactacaaatctacaagtgtggactttgctgttaatacagaaggcgtgtactctgaaccccgccccattggcacccgttacctcacccgtaatctgtaa

SEQ ID NO: 3895 - DNA, 2217 bp, Artificial Sequence
  source: /note="Description of Artificial Sequence: Synthetic polynucleotide"
atggctgccgatggttatcttccagattggctcgaggacaacctctctgagggcattcgcgagtggtgggcgctgaaacctggagccccgaagcccaaagccaaccagcaaaagcaggacgacggccggggtctggtgcttcctggctacaagtacctcggacccttcaacggactcgacaagggggagcccgtcaacgcggcggacgcggcggccctcgagcacgacaaggcctacgaccagcagctgcaggcgggtgacaatccgtacctgcggtataaccacgccgacgccgagtttcaggagcgtctgcaagaagatacgtcttttgggggcaacctcgggcgagcagtcttccaggccaagaagcgggttctcgaacctctcggtctggttgaggaaggcgctaagacggctcctggaaagaagagaccggtagagccatcaccccagcgttctccagactcctctacgggcatcggcaagaagggccaacagcccgccagaaaaagactcaattttggtcagactggcgactcagagtcagttccagaccctcaacctctcggagaacctccagcagcgccctctggtgtgggacctaatacaatggctgcaggcggtggcgcaccaatggcagacaataacgaaggcgccgacggagtgggtagttcctcgggaaattggcattgcgattccacatggctgggcgacagagtcatcaccaccagcacccgaacctgggccccgcccacctacaacaaccacctctacaagcaaatctccaacgggacatcgggaggagccaccaacgacaacacctacttcggctacagcaccccctgggggtattttgactttaacagattccactgccacttttcaccacgtgactggcagcgactcatcaacaacaactggggattccggcccaagagactcagcttcaagctcttcaacatccaggtcaaggaggtcacgcagaatgaaggcaccaagaccatcgccaataacctcaccagcaccatccaggtgtttacggactcggagtaccagctgccgtacgttctcggctctgcccaccagggctgcctgcctccgttcccggcggacgtgttcacgattccccagtacggctacctaacactcaacaacggtagtcaggccgtgggacgctcctccttctactgcctggaatactttccttcgcagatgctgagaaccggcaacaacttccagtttacttacaccttcgaggacgtgcctttccacagcagctacgcccacagccagagcttggaccggctgatgaatcctctgattgaccagtacctgtactacttgtctcggattcaaacaacaggaggcacggcaaatacgcagactctgggcttcagccaaggtgggcctaatacaatggccaatcaggcaaagaactggctgccaggaccctgttaccgccaacaacgcgtctcaacgacaaccgggcaaaacaacaatagcaactttgcctggactgctgggaccaaataccatctgaatggaagaaattcattggctaatcctggcatcgctatggcaacacacaaagacgacgaggagcgtttttttcccagtaacgggatcctgatttttggcaaacaaaatgctgccagagacaatgcggattacagcgatgtcatgcccaccagcgaggaagaaatcaaaaccactaaccctgtggccacagaggaatacggtatcgtggcagataacttgcagcagcaaaacacggctcctcaaattggaactgtcaacagccagggggccttacccggtatggtctggcagaaccgggacgtgtacctgcagggtcccatctgggccaagattcctcacacggacggcaacttccacccgtctccgctgatgggcggctttggcctgaaacatcctccgcctcagatcctgatcaagaacacgcctgtacctgcggatcctccgaccaccttcaaccagtcaaagctgaactctttcatcacgcaatacagcaccggacaggtcagcgtggaaattgaatgggagctgcagaaggaaaacagcaagcgctggaaccccgagatccagtacacctccaactactacaaatctacaagtgtggactttgctgttaatacagaaggcgtgtactctgaaccccgccccattggcacccgttacctcacccgtaatctgtaa

SEQ ID NO: 3896 - DNA, 2217 bp, Artificial Sequence
  source: /note="Description of Artificial Sequence: Synthetic polynucleotide"
atggctgccgatggttatcttccagattggctcgaggacaacctctctgagggcattcgcgagtggtgggcgctgaaacctggagccccgaagcccaaagccaaccagcaaaagcaggacgacggccggggtctggtgcttcctggctacaagtacctcggacccttcaacggactcgacaagggggagcccgtcaacgcggcggacgcggcggccctcgagcacgacaaggcctacgaccagcagctgcaggcgggtgacaatccgtacctgcggtataaccacgccgacgccgagtttcaggagcgtctgcaagaagatacgtcttttgggggcaacctcgggcgagcagtcttccaggccaagaagcgggttctcgaacctctcggtctggttgaggaaggcgctaagacggctcctggaaagaagagaccggtagagccatcaccccagcgttctccagactcctctacgggcatcggcaagaagggccaacagcccgccagaaaaagactcaattttggtcagactggcgactcagagtcagttccagaccctcaacctctcggagaacctccagcagcgccctctggtgtgggacctaatacaatggctgcaggcggtggcgcaccaatggcagacaataacgaaggcgccgacggagtgggtagttcctcgggaaattggcattgcgattccacatggctgggcgacagagtcatcaccaccagcacccgaacctgggccctgcccacctacaacaaccacctctacaagcaaatctccaacgggacatcgggaggagccaccaacgacaacacctacttcggctacagcaccccctgggggtattttgactttaacagattccactgccacttttcaccacgtgactggcagcgactcatcaacaacaactggggattccggcccaagagactcggcttcaagctcttcaacatccaggtcaaggaggtcacgcagaatgaaggcaccaagaccatcgccaataacctcaccagcaccatccaggtgtttacggactcggagtaccagctgccgtacgttctcggctctgcccaccagggctgcctgcctccgttcccggcggacgtgttcacgattccccagtacggctacctaacactcaacaacggtagtcaggccgtgggacgctcctccttctactgcctggaatactttccttcgcagatgctgagaaccggcaacaacttccagtttacttacaccttcgaggacgtgcctttccacagcagctacgcccacagccagagcttggaccggctgatgaatcctctgattgaccagtacctgtactacttgtctcggattcaaacaacaggaggcacggcaaatacgcagactctgggcttcagccaaggtgggcctaatacaatggccaatcaggcaaagaactggctgccaggaccctgttaccgccaacaacgcgtctcaacgacaaccgggcaaaacaacaatagcaactttgcctggactgctgggaccaaataccacctgaatggaagaaattcattggctaatcctggcatcgctatggcaacacacaaagacgacgaggagcgtttttttcccagtaacgggatcctgatttttggcaaacaaaatgctgccagagacaatgcggattacagcgatgtcatgcccaccagcgaggaagaaatcaaaaccactaaccctgtggccacagaggaatacggtatcgtggcagataacttgcagcagcaaaacacggctcctcaaattggaactgtcaacagccagggggccttacccggtatggtctggcagaaccgggacgtgtacctgcagggtcccatctgggccaagattcctcacacggacggcaacttccacccgtctccgctgatgggcggctttggcctgaaacatcctccgcctcagatcctgatcaagaacacgcctgtacctgcggatcctccgaccaccttcaaccagtcaaagctgaactctttcatcacgcaatacagcaccggacaggtcagcgtggaaattgaatgggagctgcagaaggaaaacagcaagcgctggaaccccgagatccagtacacctccaactactacaaatctacaagtgtggactttgctgttaatacagaaggcgtgtactctgaaccccgccccattggcacccgttacctcacccgtaatctgtaa

SEQ ID NO: 3897 - DNA, 2217 bp, Artificial Sequence
  source: /note="Description of Artificial Sequence: Synthetic polynucleotide"
atggctgccgatggttatcttccagattggctcgaggacaacctctctgagggcattcgcgagtggtgggcgctgaaacctggagccccgaagcccaaagccaaccagcaaaagcaggacgacggccggggtctggtgcttcctggctacaagtacctcggacccttcaacggactcgacaagggggagcccgtcaacgcggcggacgcggcggccctcgagcacgacaaggcctacgaccagcagctgcaggcgggtgacaatccgtacctgcggtataaccacgccgacgccgagtttcaggagcgtctgcaagaagatacgtcttttgggggcaacctcgggcgagcagtcttccaggccaagaagcgggttctcgaacctctcggtctggttgaggaaggcgctaagacggctcctggaaagaagagaccggtagagccatcaccccagcgttctccagactcctctacgggcatcggcaagaagggccaacagcccgccagaaaaagactcaattttggtcggactggcgactcagagtcagttccagaccctcaacctctcggagaacctccagcagcgccctctggtgtgggacctaatacaatggctgcaggcggtggcgcaccaatggcagacaataacgaaggcgccgacggagtgggtagttcctcgggaaattggcattgcgattccacatggctgggcgacagagtcatcaccaccagcacccgaacctgggccctgcccacctacaacaaccacctctacaagcaaatctccaacgggacatcgggaggagccaccaacgacaacacctacttcggctacagcaccccctgggggtattttgactttaacagattccactgccacttttcaccacgtgactggcagcgactcatcaacaacaactggggattccggcccaagagactcagcttcaagctcttcaacatccaggtcaaggaggtcacgcagaatgaaggcaccaagaccatcgccaataacctcaccagcaccatccaggtgtttacggactcggagtaccagctgccgtacgttctcggctctgcccaccagggctgcctgcctccgttcccggcggacgtgttcacgattccccagtacggctacctaacactcaacaacggtagtcaggccgtgggacgctcctccttctactgcctggaatactttccttcgcagatgctgagaaccggcaacaacttccagtttacttacaccttcgaggacgtgcctttccacagcagctacgcccacagccagagcttggaccggctgatgaatcctctgattgaccagtacctgtactacttgtctcggattcaaacaacaggaggcacggcaaatacgcagactctgggcttcagccaaggtgggcctaatacaatggccaatcaggcaaagaactggctgccaggaccctgttaccgccaacaacgcgtctcaacgacaaccgggcaaaacaacaatagcaactttgcctggactgctgggaccaaataccatctgaatggaagaaattcattggctaatcctggcatcgctatggcaacacacaaagacgacgaggagcgtttttttcccagtaacgggatcctgatttttggcaaacaaaatgctgccagagacaatgcggattacagcgatgtcatgcccaccagcgaggaagaaatcaaaaccactaaccctgtggccacagaggaatacggtatcgtggcagataacttgcagcagcaaaacacggctcctcaaattggaactgtcaacagccagggggccttacccggtatggtctggcagaaccgggacgtgtacctgcagggtcccatctgggccaagattcctcacacggacggcaacttccacccgtctccgctgatgggcggctttggcctgaaacatcctccgcctcagatcctgatcaagaacacgcctgtacctgcggatcctccgaccaccttcaaccagtcaaagctgaactctttcatcacgcaatacagcaccggacaggtcagcgtggaaattgaatgggagctgcagaaggaaaacagcaagcgctggaaccccgagatccagtacacctccaactactacaaatctacaagtgtggactttgctgttaatacagaaggcgtgtactctgaaccccgccccattggcacccgttacctcacccgtaatctgtaa

SEQ ID NO: 3898 - DNA, 2217 bp, Artificial Sequence
  source: /note="Description of Artificial Sequence: Synthetic polynucleotide"
atggctgccgatggttatcttccagattggctcgaggacaacctctctgagggcattcgcgagtggtgggcgctgaaacctggagccccgaagcccaaagccaaccagcaaaagcaggacgacggccggggtctggtgcttcctggctacaagtacctcggacccttcaacggactcgacaagggggagcccgtcaacgcggcggacgcggcggccctcgagcacgacaaggcctacgaccagcagctgcaggcgggtgacaatccgtacctgcggtataaccacgccgacgccgagtttcaggagcgtctgcaagaagatacgtcttttgggggcaacctcgggcgagcagtcttccaggccaagaagcgggttctcgaacctctcggtctggttgaggaaggcgctaagacggctcctggaaagaagagaccggtagagccatcaccccagcgttctccagactcctctacgggcatcggcaagaagggccaacagcccgccagaaaaagactcaattttggtcagactggcgactcagagtcagttccagaccctcaacctctcggagaacctccagcagcgccctctggtgtgggacctaatacaatggctgcaggcggtggcgcaccaatggcagacaataacgaaggcgccgacggagtgggtagttcctcgggaaattggcattgcgattccacatggctgggcgacagagtcatcaccaccagcacccgaacctgggccctgcccacctacaacaaccacctctacaagcaaatctccaacgggacatcgggaggagccaccaacgacaacacctacttcggctacagcaccccctgggggtattttgactttaacagattccactgccacttttcaccacgtgactggcagcgactcatcaacaacaactggggattccggcccaagagactcagcttcaagctcttcaacatccaggtcaaggaggtcacgcagaatgaaggcaccaagaccatcgccaataacctcaccagcaccatccaggtgtttacggactcggagtaccagctgccgtacgttctcggctctgcccaccagggctgcctgcctccgttcccggcggacgtgttcacgattccccagtacggctacctaacactcaacaacggtagtcaggccgtgggacgctcctccttctactgcctggaatactttccttcgcagatgctgagaaccggcaacaacttccagtttacttacaccttcgaggacgtgcctttccacagcagctacgcccacagccagagcttggaccggctgatgaatcctctgattgaccagtacctgtactacttgtctcggattcaaacaacaggaggcacggcaaatacgcagactctgggcttcagccaaggtgggcctaatacagtggccaatcaggcaaagaactggctgccaggaccctgttaccgccaacaacgcgtctcaacgacaaccgggcaaaacaacaatagcaactttgcctggactgctgggaccaaataccatctgaatggaagaaattcattggctaatcctggcatcgctatggcaacacacaaagacgacgaggagcgtttttttcccagtaacgggatcctgatttttggcaaacaaaatgctgccagagacaatgcggattacagcgatgtcatgcccaccagcgaggaagaaatcaaaaccactaaccctgtggccacagaggaatacggtatcgtggcagataacttgcagcagcaaaacacggctcctcaaattggaactgtcaacagccagggggccttacccggtatggtctggcagaaccgggacgtgtacctgcagggtcccatctgggccaagattcctcacacggacggcaacttccacccgtctccgctgatgggcggctttggcctgaaacatcctccgcctcagatcctgatcaagaacacgcctgtacctgcggatcctccgaccaccttcaaccagtcaaagctgaactctttcatcacgcaatacagcaccggacaggtcagcgtggaaattgaatgggagctgcagaaggaaaacagcaagcgctggaaccccgagatccagtacacctccaactactacaaatctacaagtgtggactttgctgttaatacagaaggcgtgtactctgaaccccgccccattggcacccgttacctcacccgtaatctgtaa

SEQ ID NO: 3899 - DNA, 2217 bp, Artificial Sequence
  source: /note="Description of Artificial Sequence: Synthetic polynucleotide"
atggctgccgatggttatcttccagattggctcgaggacaacctctctgagggcattcgcgagtggtgggcgctgaaacctggagccccgaagcccaaagccaaccagcaaaagcaggacgacggccggggtctggtgcttcctggctacaagtacctcggacccttcaacggactcgacaagggggagcccgtcaacgcggcggacgcggcggccctcgagcacgacaaggcctacgaccagcagctgcaggcgggtgacaatccgtacctgcggtataaccacgccgacgccgagtttcaggagcgtctgcaagaagatacgtcttttgggggcaacctcgggcgagcagtcttccaggccaagaagcgggttctcgaacctctcggtctggttgaggaaggcgctaagacggctcctggaaagaagagaccggtagagccatcaccccagcgttctccagactcctctacgggcatcggcaagaagggccaacagcccgccagaaaaagactcaattttggtcagactggcgactcagagtcagttccagaccctcaacctctcggagaacctccagcagcgccctctggtgtgggacctaatacaatggctgcaggcggtggcgcaccaatggcagacaataacgaaggcgccgacggagtgggtagttcctcgggaaattggcattgcgattccacatggctgggcgacagagtcatcaccaccagcacccgaacctgggccctgcccacctacaacaaccacctctacaagcaaatctccaacgggacatcgggaggagccaccaacgacaacacctacttcggctacagcaccccctgggggtattttgactttaacagattccactgccacttttcaccacgtgactggcagcgactcatcaacaacaactggggattccggcccaagagactcagcttcaagctcttcaacatccaggtcaaggaggtcacgcagaatgaaggcaccaagaccatcgccaataacctcaccagcaccatccaggtgtttacggactcggagtaccagctgccgtacgttctcggctctgcccaccagggctgcctgcctccgttcccggcggacgtgttcacgattccccagtacggctacctaacactcaacaacggtagtcaggccgtgggacgctcctccttctactgcccggaatactttccttcgcagatgctgagaaccggcaacaacttccagtttacttacaccttcgaggacgtgcctttccacagcagctacgcccacagccagagcttggaccggctgatgaatcctctgattgaccagtacctgtactacttgtctcggattcaaacaacaggaggcacggcaaatacgcagactctgggcttcagccaaggtgggcctaatacaatggccaatcaggcaaagaactggctgccaggaccctgttaccgccaacaacgcgtctcaacgacaaccgggcaaaacaacaatagcaactttgcctggactgctgggaccaaataccatctgaatggaagaaattcattggctaatcctggcatcgctatggcaacacacaaagacgacgaggagcgtttttttcccagtaacgggatcctgatttttggcaaacaaaatgctgccagagacaatgcggattacagcgatgtcatgcccaccagcgaggaagaaatcaaaaccactaaccctgtggccacagaggaatacggtatcgtggcagataacttgcagcagcaaaacacggctcctcaaattggaactgtcaacagccagggggccttacccggtatggtctggcagaaccgggacgtgtacctgcagggtcccatctgggccaagattcctcacacggacggcaacttccacccgtctccgctgatgggcggctttggcctgaaacatcctccgcctcagatcctgatcaagaacacgcctgtacctgcggatcctccgaccaccttcaaccagtcaaagctgaactctttcatcacgcaatacagcaccggacaggtcagcgtggaaattgaatgggagctgcagaaggaaaacagcaagcgctggaaccccgagatccagtacacctccaactactacaaatctacaagtgtggactttgctgttaatacagaaggcgtgtactctgaaccccgccccattggcacccgttacctcacccgtaatctgtaa

SEQ ID NO: 3900 - DNA, 2217 bp, Artificial Sequence
  source: /note="Description of Artificial Sequence: Synthetic polynucleotide"
atggctgccgatggttatcttccagattggctcgaggacaacctctctgagggcattcgcgagtggtgggcgctgaaacctggagccccgaagcccaaagccaaccagcaaaagcaggacgacggccggggtctggtgcttcctggctacaagtacctcggacccttcaacggactcgacaagggggagcccgtcaacgcggcggacgcggcggccctcgagcacgacaaggcctacgaccagcagctgcaggcgggtgacaatccgtacctgcggtataaccacgccgacgccgagtttcaggagcgtctgcaagaagatacgtcttttgggggcaacctcgggcgagcagtcttccaggccaagaagcgggttctcgaacctctcggtctggttgaggaaggcgctaagacggctcctggaaagaagagaccggtagagccatcaccccagcgttctccagactcctctacgggcatcggcaagaagggccaacagcccgccagaaaaagactcaattttggtcagactggcgactcagagtcagttccagaccctcaacctctcggagaacctccagcagcgccctctggtgtgggacctaatacaatggctgcaggcggtggcgcaccaatggcagacaataacgaaggcgccgacggagtgggtagttcctcgggaaattggcattgcgattccacatggctgggcgacagagtcatcaccaccagcacccgaacctgggccctgcccacctacaacaaccacctctacaagcaaatctccaacgggacatcgggaggagccaccaacgacaacacctacttcggctacagcaccccctgggggtattttgactttaacagattccactgccacttttcaccacgtgactggcagcgactcatcaacaacaactggggattccggcccaagagactcagcttcaagctcttcaacatccaggtcaaggaggtcacgcagaatgaaggcaccaagaccatcgccaataacctcaccagcaccatccaggtgtttacggactcggagtaccagctgccgtacgttctcggctctgcccaccagggctgcctgcctccgttcccggcggacgtgttcacgattccccagtacggctacctaacactcaacaacggtagtcaggccgtgggacgctcctccttctactgcctggaatactttccttcgcagatgctgagaaccggcaacaacttccagtttacttacaccttcgaggacgtgcctttccacagcagctacgcccacagccagagcttggaccggctgatgaatcctctgattgaccagtacctgtactacttgtctcggattcaaacaacaggaggcacggcaaatacgcagactctgggcttcagccaaggtgggcctaatacaatggccaatcaggcaaagaactggctgccaggaccctgttaccgccaacaacgcgtctcaacgacaaccgggcaaaacaacaatagcaactttgcctggactgctgggaccaaataccatctgaatggaagaaattcattggctaatcctggcatcgctatggcaacacacaaagacgacgaggagcgtttttttcccagtaacgggatcctgatttttggcaaacaaaatgctgccagagacaatgcggattacagcgatgtcatgcccaccagcgaggaagaaatcaaaaccactaaccctgtggccacagaggaatacggtatcgtggcagatagcttgcagcagcaaaacacggctcctcaaattggaactgtcaacagccagggggccttacccggtatggtctggcagaaccgggacgtgtacctgcagggtcccatctgggccaagattcctcacacggacggcaacttccacccgtctccgctgatgggcggctttggcctgaaacatcctccgcctcagatcctgatcaagaacacgcctgtacctgcggatcctccgaccaccttcaaccagtcaaagctgaactctttcatcacgcaatacagcaccggacaggtcagcgtggaaattgaatgggagctgcagaaggaaaacagcaagcgctggaaccccgagatccagtacacctccaactactacaaatctacaagtgtggactttgctgttaatacagaaggcgtgtactctgaaccccgccccattggcacccgttacctcacccgtaatctgtaa

SEQ ID NO: 3901 - DNA, 2217 bp, Artificial Sequence
  source: /note="Description of Artificial Sequence: Synthetic polynucleotide"
atggctgccgatggttatcttccagattggctcgaggacaacctctctgagggcattcgcgagtggtgggcgctgaaacctggagccccgaagcccaaagccaaccagcaaaagcagggcgacggccggggtctggtgcttcctggctacaagtacctcggacccttcaacggactcgacaagggggagcccgtcaacgcggcggacgcggcggccctcgagcacgacaaggcctacgaccagcagctgcaggcgggtgacaatccgtacctgcggtataaccacgccgacgccgagtttcaggagcgtctgcaagaagatacgtcttttgggggcaacctcgggcgagcagtcttccaggccaagaagcgggttctcgaacctctcggtctggttgaggaaggcgctaagacggctcctggaaagaagagaccggtagagccatcaccccagcgttctccagactcctctacgggcatcggcaagaagggccaacagcccgccagaaaaagactcaattttggtcagactggcgactcagagtcagttccagaccctcaacctctcggagaacctccagcagcgccctctggtgtgggacctaatacaatggctgcaggcggtggcgcaccaatggcagacaataacgaaggcgccgacggagtgggtagttcctcgggaaattggcattgcgattccacatggctgggcgacagagtcatcaccaccagcacccgaacctgggccctgcccacctacaacaaccacctctacaagcaaatctccaacgggacatcgggaggagccaccaacgacaacacctacttcggctacagcaccccctgggggtattttgactttaacagattccactgccacttttcaccacgtgactggcagcgactcatcaacaacaactggggattccggcccaagagactcagcttcaagctcttcaacatccaggtcaaggaggtcacgcagaatgaaggcaccaagaccatcgccaataacctcaccagcaccatccaggtgtttacggactcggagtaccagctgccgtacgttctcggctctgcccaccagggctgcctgcctccgttcccggcggacgtgttcacgattccccagtacggctacctaacactcaacaacggtagtcaggccgtgggacgctcctccttctactgcctggaatactttccttcgcagatgctgagaaccggcaacaacttccagtttacttacaccttcgaggacgtgcctttccacagcagctacgcccacagccagagcttggaccggctgatgaatcctctgattgaccagtacctgtactacttgtctcggattcaaacaacaggaggcacggcaaatacgcagactctgggcttcagccaaggtgggcctaatacaatggccaatcaggcaaagaactggctgccaggaccctgttaccgccaacaacgcgtctcaacgacaaccgggcaaaacaacaatagcaactttgcctggactgctgggaccaaataccatctgaatggaagaaattcattggctaatcctggcatcgctatggcaacacacaaagacgacgaggagcgtttttttcccagtaacgggatcctgatttttggcaaacaaaatgctgccagagacaatgcggattacagcgatgtcatgcccaccagcgaggaagaaatcaaaaccactaaccctgtggccacagaggaatacggtatcgtggcagataacttgcagcagcaaaacacggctcctcaaattggaactgtcaacagccagggggccttacccggtatggtctggcagaaccgggacgtgtacctgcagggtcccatctgggccaagattcctcacacggacggcaacttccacccgtctccgctgatgggcggctttggcctgaaacatcctccgcctcagatcctgatcaagaacacgcctgtacctgcggatcctccgaccaccttcaaccagtcaaagctgaactctttcatcacgcaatacagcaccggacaggtcagcgtggaaattgaatgggagctgcagaaggaaaacagcaagcgctggaaccccgagatccagtacacctccaactactacaaatctacaagtgtggactttgctgttaatacagaaggcgtgtactctgaaccccgccccattggcacccgttacctcacccgtaatctgtaa

SEQ ID NO: 3902 - DNA, 2217 bp, Artificial Sequence
  source: /note="Description of Artificial Sequence: Synthetic polynucleotide"
atggctgccgatggttatcttccagattggctcgaggacaacctctctgagggcattcgcgagtggtgggcgctgaaacctggagccccgaagcccaaagccaaccagcaaaagcaggacgacggccggggtctggtgcttcctggctacaagtacctcggacccttcaacggactcgacaagggggagcccgtcaacgcggcggacgcggcggccctcgagcacgacaaggcctacgaccagcagctgcaggcgggtgacaatccgtacctgcggtataaccacgccgacgccgagtttcaggagcgtctgcaagaagatacgtcttttgggggcaacctcgggcgagcagtcttccaggccaagaagcgggttctcgaacctctcggtctggttgaggaaggcgctaagacggctcctggaaagaagagaccggtagagccatcaccccagcgttctccagactcctctacgggcatcggcaagaagggccaacagcccgccagaaaaagactcaattttggtcagactggcgactcagagtcagttccagaccctcaacctctcggagaacctccagcagcgccctctggtgtgggacctaatacaatggctgcaggcggtggcgcaccaatggcagacaataacgaaggcgccgacggagtgggtagttcctcgggaaattggcattgcgattccacatggctgggcgacagagtcatcaccaccagcacccgaacctgggccctgcccacctacaacaaccacctctacaagcaaatctccaacgggacatcgggaggagccaccaacgacaacacctacttcggctacagcaccccctgggggtattttgactttaacagattccactgccacttttcaccacgtgactggcagcgactcatcaacaacaactggggattccggcccaagagactcagctccaagctcttcaacatccaggtcaaggaggtcacgcagaatgaaggcaccaagaccatcgccaataacctcaccagcaccatccaggtgtttacggactcggagtaccagctgccgtacgttctcggctctgcccaccagggctgcctgcctccgttcccggcggacgtgttcacgattccccagtacggctacctaacactcaacaacggtagtcaggccgtgggacgctcctccttctactgcctggaatactttccttcgcagatgctgagaaccggcaacaacttccagtttacttacaccttcgaggacgtgcctttccacagcagctacgcccacagccagagcttggaccggctgatgaatcctctgattgaccagtacctgtactacttgtctcggattcaaacaacaggaggcacggcaaatacgcagactctgggcttcagccaaggtgggcctaatacaatggccaatcaggcaaagaactggctgccaggaccctgttaccgccaacaacgcgtctcaacgacaaccgggcaaaacaacaatagcaactttgcctggactgctgggaccaaataccatctgaatggaagaaattcattggctaatcctggcatcgctatggcaacacacaaagacgacgaggagcgtttttttcccagtaacgggatcctgatttttggcaaacaaaatgctgccagagacaatgcggattacagcgatgtcatgcccaccagcgaggaagaaatcaaaaccactaaccctgtggccacagaggaatacggtatcgtggcagataacttgcagcagcaaaacacggctcctcaaattggaactgtcaacagccagggggccttacccggtatggtctggcagaaccgggacgtgtacctgcagggtcccatctgggccaagattcctcacacggacggcaacttccacccgtctccgctgatgggcggctttggcctgaaacatcctccgcctcagatcctgatcaagaacacgcctgtacctgcggatcctccgaccaccttcaaccagtcaaagctgaactctttcatcacgcaatacagcaccggacaggtcagcgtggaaattgaatgggagctgcagaaggaaaacagcaagcgctggaaccccgagatccagtacacctccaactactacaaatctacaagtgtggactttgctgttaatacagaaggcgtgtactctgaaccccgccccattggcacccgttacctcacccgtaatctgtaa

SEQ ID NO: 3903 - DNA, 2217 bp, Artificial Sequence
  source: /note="Description of Artificial Sequence: Synthetic polynucleotide"
atggctgccgatggttatcttccagattggctcgaggacaacctctctgagggcattcgcgagtggtgggcgctgaaacctggagccccgaagcccaaagccaaccagcaaaagcaggacgacggccggggtctggtgcttcctggctacaagtacctcggacccttcaacggactcgacaagggggagcccgtcaacgcggcggacgcggcggccctcgagcacgacaaggcctacgaccagcagctgcaggcgggtgacaatccgtacctgcggtataaccacgccgacgccgagtttcaggagcgtctgcaagaagatacgtcttttgggggcaacctcgggcgagcagtcttccaggccaagaagcgggttctcgaacctctcggtctggttgaggaaggcgctaagacggctcctggaaagaagagaccggtagagccatcaccccagcgttctccagactcctctacgggcatcggcaagaagggccaacagcccgccagaaaaagactcaattttggtcagactggcgactcagagtcagttccagaccctcaacctctcggagaacctccagcagcgccctctggtgtgggacctaatacaatggctgcaggcggtggcgcaccaatggcagacaataacgaaggcgccgacggagtgggtagttcctcgggaaattggcattgcgattccacatggctgggcgacagagtcatcaccaccagcacccgaacctgggccctgcccacctacaacaaccacctctacaagcaaatctccaacgggacatcgggaggagccaccaacgacaacacctacttcggctacagcaccccctgggggtattttgactttaacagattccactgccacttttcaccacgtgactggcagcgactcatcaacaacaactggggattccggcccaagagactcagcttcaagctcttcaacatccaggtcaaggaggtcacgcagaatgaaggcaccaagaccatcgccaataacctcaccagcaccatccaggtgtttacggactcggagtaccagctgccgtacgttctcggctctgcccaccagggctgcctgcctccgttcccggcggacgtgttcacgattccccagtacggctacctaacactcaacaacggtagtcaggccgtgggacgctcctccttctactgcctggaatactttccttcgcagatgctgagaaccggcaacaacttccagtttacttacgccttcgaggacgtgcctttccacagcagctacgcccacagccagagcttggaccggctgatgaatcctctgattgaccagtacctgtactacttgtctcggattcaaacaacaggaggcacggcaaatacgcagactctgggcttcagccaaggtgggcctaatacaatggccaatcaggcaaagaactggctgccaggaccctgttaccgccaacaacgcgtctcaacgacaaccgggcaaaacaacaatagcaactttgcctggactgctgggaccaaataccatctgaatggaagaaattcattggctaatcctggcatcgctatggcaacacacaaagacgacgaggagcgtttttttcccagtaacgggatcctgatttttggcaaacaaaatgctgccagagacaatgcggattacagcgatgtcatgcccaccagcgaggaagaaatcaaaaccactaaccctgtggccacagaggaatacggtatcgtggcagataacttgcagcagcaaaacacggctcctcaaattggaactgtcaacagccagggggccttacccggtatggtctggcagaaccgggacgtgtacctgcagggtcccatctgggccaagattcctcacacggacggcaacttccacccgtctccgctgatgggcggctttggcctgaaacatcctccgcctcagatcctgatcaagaacacgcctgtacctgcggatcctccgaccaccttcaaccagtcaaagctgaactctttcatcacgcaatacagcaccggacaggtcagcgtggaaattgaatgggagctgcagaaggaaaacagcaagcgctggaaccccgagatccagtacacctccaactactacaaatctacaagtgtggactttgctgttaatacagaaggcgtgtactctgaaccccgccccattggcacccgttacctcacccgtaatctgtaa

SEQ ID NO: 3904 - DNA, 2217 bp, Artificial Sequence
  source: /note="Description of Artificial Sequence: Synthetic polynucleotide"
atggctgccgatggttatcttccagattggctcgaggacaacctctctgagggcattcgcgagtggtgggcgctgaaacctggagccccgaagcccaaagccaaccagcaaaagcaggacgacggccggggtctggtgcttcctggctacaagtacctcggacccttcaacggactcgacaagggggagcccgtcaacgcggcggacgcggcggccctcgagcacgacaaggcctacgaccagcagctgcaggcgggtgacaatccgtacctgcggtataaccacgccgacgccgagtttcaggagcgtctgcaagaagatacgtcttttgggggcaacctcgggcgagcagtcttccaggccaagaagcgggttctcgaacctctcggtctggttgaggaaggcgctaagacggctcctggaaagaagagaccggtagagccatcaccccagcgttctccagactcctctacgggcatcggcaagaagggccaacagcccgccagaaaaagactcaattttggtcagactggcgactcagagtcagttccagaccctcaacctctcggagaacctccagcagcgccctctggtgtgggacctaatacaatggctgcaggcggtggcgcaccaatggcagacaataacgaaggcgccgacggagtgggtagttcctcgggaaattggcattgcgattccacatggctgggcgacagagtcatcaccaccagcacccgaacctgggccctgcccgcctacaacaaccacctctacaagcaaatctccaacgggacatcgggaggagccaccaacgacaacacctacttcggctacagcaccccctgggggtattttgactttaacagattccactgccacttttcaccacgtgactggcagcgactcatcaacaacaactggggattccggcccaagagactcagcttcaagctcttcaacatccaggtcaaggaggtcacgcagaatgaaggcaccaagaccatcgccaataacctcaccagcaccatccaggtgtttacggactcggagtaccagctgccgtacgttctcggctctgcccaccagggctgcctgcctccgttcccggcggacgtgttcacgattccccagtacggctacctaacactcaacaacggtagtcaggccgtgggacgctcctccttctactgcctggaatactttccttcgcagatgctgagaaccggcaacaacttccagtttacttacaccttcgaggacgtgcctttccacagcagctacgcccacagccagagcttggaccggctgatgaatcctctgattgaccagtacctgtactacttgtctcggattcaaacaacaggaggcacggcaaatacgcagactctgggcttcagccaaggtgggcctaatacaatggccaatcaggcaaagaactggctgccaggaccctgttaccgccaacaacgcgtctcaacgacaaccgggcaaaacaacaatagcaactttgcctggactgctgggaccaaataccatctgaatggaagaaattcattggctaatcctggcatcgctatggcaacacacaaagacgacgaggagcgtttttttcccagtaacgggatcctgatttttggcaaacaaaatgctgccagagacaatgcggattacagcgatgtcatgcccaccagcgaggaagaaatcaaaaccactaaccctgtggccacagaggaatacggtatcgtggcagataacttgcagcagcaaaacacggctcctcaaattggaactgtcaacagccagggggccttacccggtatggtctggcagaaccgggacgtgtacctgcagggtcccatctgggccaagattcctcacacggacggcaacttccacccgtctccgctgatgggcggctttggcctgaaacatcctccgcctcagatcctgatcaagaacacgcctgtacctgcggatcctccgaccaccttcaaccagtcaaagctgaactctttcatcacgcaatacagcaccggacaggtcagcgtggaaattgaatgggagctgcagaaggaaaacagcaagcgctggaaccccgagatccagtacacctccaactactacaaatctacaagtgtggactttgctgttaatacagaaggcgtgtactctgaaccccgccccattggcacccgttacctcacccgtaatctgtaa

SEQ ID NO: 3905 - DNA, 2217 bp, Artificial Sequence
  source: /note="Description of Artificial Sequence: Synthetic polynucleotide"
atggctgccgatggttatcttccagattggctcgaggacaacctctctgagggcattcgcgagtggtgggcgctgaaacctggagccccgaagcccaaagccaaccagcaaaagcaggacgacggccggggtctggtgcttcctggctacaagtacctcggacccttcaacggactcgacaagggggagcccgtcaacgcggcggacgcggcggccctcgagcacgacaaggcctacgaccagcagctgcaggcgggtgacaatccgtacctgcggtataaccacgccgacgccgagtttcaggagcgtctgcaagaagatacgtcttttgggggcagcctcgggcgagcagtcttccaggccaagaagcgggttctcgaacctctcggtctggttgaggaaggcgctaagacggctcctggaaagaagagaccggtagagccatcaccccagcgttctccagactcctctacgggcatcggcaagaagggccaacagcccgccagaaaaagactcaattttggtcagactggcgactcagagtcagttccagaccctcaacctctcggagaacctccagcagcgccctctggtgtgggacctaatacaatggctgcaggcggtggcgcaccaatggcagacaataacgaaggcgccgacggagtgggtagttcctcgggaaattggcattgcgattccacatggctgggcgacagagtcatcaccaccagcacccgaacctgggccctgcccacctacaacaaccacctctacaagcaaatctccaacgggacatcgggaggagccaccaacgacaacacctacttcggctacagcaccccctgggggtattttgactttaacagattccactgccacttttcaccacgtgactggcagcgactcatcaacaacaactggggattccggcccaagagactcagcttcaagctcttcaacatccaggtcaaggaggtcacgcagaatgaaggcaccaagaccatcgccaataacctcaccagcaccatccaggtgtttacggactcggagtaccagctgccgtacgttctcggctctgcccaccagggctgcctgcctccgttcccggcggacgtgttcacgattccccagtacggctacctaacactcaacaacggtagtcaggccgtgggacgctcctccttctactgcctggaatactttccttcgcagatgctgagaaccggcaacaacttccagtttacttacaccttcgaggacgtgcctttccacagcagctacgcccacagccagagcttggaccggctgatgaatcctctgattgaccagtacctgtactacttgtctcggattcaaacaacaggaggcacggcaaatacgcagactctgggcttcagccaaggtgggcctaatacaatggccaatcaggcaaagaactggctgccaggaccctgttaccgccaacaacgcgtctcaacgacaaccgggcaaaacaacaatagcaactttgcctggactgctgggaccaaataccatctgaatggaagaaattcattggctaatcctggcatcgctatggcaacacacaaagacgacgaggagcgtttttttcccagtaacgggatcctgatttttggcaaacaaaatgctgccagagacaatgcggattacagcgatgtcatgcccaccagcgaggaagaaatcaaaaccactaaccctgtggccacagaggaatacggtatcgtggcagataacttgcagcagcaaaacacggctcctcaaattggaactgtcaacagccagggggccttacccggtatggtctggcagaaccgggacgtgtacctgcagggtcccatctgggccaagattcctcacacggacggcaacttccacccgtctccgctgatgggcggctttggcctgaaacatcctccgcctcagatcctgatcaagaacacgcctgtacctgcggatcctccgaccaccttcaaccagtcaaagctgaactctttcatcacgcaatacagcaccggacaggtcagcgtggaaattgaatgggagctgcagaaggaaaacagcaagcgctggaaccccgagatccagtacacctccaactactacaaatctacaagtgtggactttgctgttaatacagaaggcgtgtactctgaaccccgccccattggcacccgttacctcacccgtaatctgtaa

SEQ ID NO: 3906 - DNA, 2217 bp, Artificial Sequence
  source: /note="Description of Artificial Sequence: Synthetic polynucleotide"
atggctgccgatggttatcttccagattggctcgaggacaacctctctgagggcattcgcgagtggtgggcgctgaaacctggagccccgaagcccaaagccaaccagcaaaagcaggacgacggccggggtctggtgcttcctggctacaagtacctcggacccttcaacggactcgacaagggggagcccgtcaacgcggcggacgcggcggccctcgagcacgacaaggcctacgaccagcagctgcaggcgggtgacaatccgtacctgcggtataaccacgccgacgccgagtttcaggagcgtctgcaagaagatacgtcttttgggggcaacctcgggcgagcagtcttccaggccaagaagcgggttctcgaacctctcggtctggttgaggaaggcgctaagacggctcctggaaagaagagaccggtagagccatcaccccagcgttctccagactcctctacgggcatcggcaagaagggccaacagcccgccagaaaaagactcaattttggtcagactggcgactcagagtcagttccagaccctcaacctctcggagaacctccagcagcgccctctggtgtgggacctaatacaatggctgcaggcggtggcgcaccaatggcagacaataacgaaggcgccgacggagtgggtagttcctcgggaaattggcattgcgattccacatggctgggcgacagagtcatcaccaccagcacccgaacctgggccctgcccacctacaacaaccacctctacaagcaaatctccaacgggacatcgggaggagccaccaacgacaacacctacttcggctacagcaccccctgggggtattttgactttaacagattccactgccacttttcaccacgtgactggcagcgactcatcaacaacaactggggattccggcccaagagactcagcttcaagctcttcaacatccaggtcaaggaggtcacgcagaatgaaggcaccaagaccatcgccaataacctcaccagcaccatccaggtgtttacggactcggagtaccagctgccgtacgttctcggctctgcccaccagggctgcctgcctccgttcccggcggacgtgttcacgattccccagtacggctacctaacactcaacaacggtagtcaggccgtgggacgctcctccttctactgcctggaatactttccttcgcagatgctgagaaccggcaacaacttccagtttacttacaccttcgaggacgtgcctttccacagcagctacgcccacagccagagcttggaccggctgatgaatcctctgattgaccagtacctgtactacttgtctcggattcaaacaacaggaggcacggcaaatacgcagactctgggcttcagccaaggtgggcctaatacaatggccaatcaggcaacgaactggctgccaggaccctgttaccgccaacaacgcgtctcaacgacaaccgggcaaaacaacaatagcaactttgcctggactgctgggaccaaataccatctgaatggaagaaattcattggctaatcctggcatcgctatggcaacacacaaagacgacgaggagcgtttttttcccagtaacgggatcctgatttttggcaaacaaaatgctgccagagacaatgcggattacagcgatgtcatgcccaccagcgaggaagaaatcaaaaccactaaccctgtggccacagaggaatacggtatcgtggcagataacttgcagcagcaaaacacggctcctcaaattggaactgtcaacagccagggggccttacccggtatggtctggcagaaccgggacgtgtacctgcagggtcccatctgggccaagattcctcacacggacggcaacttccacccgtctccgctgatgggcggctttggcctgaaacatcctccgcctcagatcctgatcaagaacacgcctgtacctgcggatcctccgaccaccttcaaccagtcaaagctgaactctttcatcacgcaatacagcaccggacaggtcagcgtggaaattgaatgggagctgcagaaggaaaacagcaagcgctggaaccccgagatccagtacacctccaactactacaaatctacaagtgtggactttgctgttaatacagaaggcgtgtactctgaaccccgccccattggcacccgttacctcacccgtaatctgtaa

SEQ ID NO: 3907 - DNA, 2217 bp, Artificial Sequence
  source: /note="Description of Artificial Sequence: Synthetic polynucleotide"
atggctgccgatggttatcttccagattggctcgaggacaacctctctgagggcattcgcgagtggtgggcgctgaaacctggagccccgaagcccaaagccaaccagcaaaagcaggacgacggccggggtctggtgcttcctggctacaagtacctcggacccttcaacggactcgacaagggggagcccgtcaacgcggcggacgcggcggccctcgagcacgacaaggcctacggccagcagctgcaggcgggtgacaatccgtacctgcggtataaccacgccgacgccgagtttcaggagcgtctgcaagaagatacgtcttttgggggcaacctcgggcgagcagtcttccaggccaagaagcgggttctcgaacctctcggtctggttgaggaaggcgctaagacggctcctggaaagaagagaccggtagagccatcaccccagcgttctccagactcctctacgggcatcggcaagaagggccaacagcccgccagaaaaagactcaattttggtcagactggcgactcagagtcagttccagaccctcaacctctcggagaacctccagcagcgccctctggtgtgggacctaatacaatggctgcaggcggtggcgcaccaatggcagacaataacgaaggcgccgacggagtgggtagttcctcgggaaattggcattgcgattccacatggctgggcgacagagtcatcaccaccagcacccgaacctgggccctgcccacctacaacaaccacctctacaagcaaatctccaacgggacatcgggaggagccaccaacgacaacacctacttcggctacagcaccccctgggggtattttgactttaacagattccactgccacttttcaccacgtgactggcagcgactcatcaacaacaactggggattccggcccaagagactcagcttcaagctcttcaacatccaggtcaaggaggtcacgcagaatgaaggcaccaagaccatcgccaataacctcaccagcaccatccaggtgtttacggactcggagtaccagctgccgtacgttctcggctctgcccaccagggctgcctgcctccgttcccggcggacgtgttcacgattccccagtacggctacctaacactcaacaacggtagtcaggccgtgggacgctcctccttctactgcctggaatactttccttcgcagatgctgagaaccggcaacaacttccagtttacttacaccttcgaggacgtgcctttccacagcagctacgcccacagccagagcttggaccggctgatgaatcctctgattgaccagtacctgtactacttgtctcggattcaaacaacaggaggcacggcaaatacgcagactctgggcttcagccaaggtgggcctaatacaatggccaatcaggcaaagaactggctgccaggaccctgttaccgccaacaacgcgtctcaacgacaaccgggcaaaacaacaatagcaactttgcctggactgctgggaccaaataccatctgaatggaagaaattcattggctaatcctggcatcgctatggcaacacacaaagacgacgaggagcgtttttttcccagtaacgggatcctgatttttggcaaacaaaatgctgccagagacaatgcggattacagcgatgtcatgcccaccagcgaggaagaaatcaaaaccactaaccctgtggccacagaggaatacggtatcgtggcagataacttgcagcagcaaaacacggctcctcaaattggaactgtcaacagccagggggccttacccggtatggtctggcagaaccgggacgtgtacctgcagggtcccatctgggccaagattcctcacacggacggcaacttccacccgtctccgctgatgggcggctttggcctgaaacatcctccgcctcagatcctgatcaagaacacgcctgtacctgcggatcctccgaccaccttcaaccagtcaaagctgaactctttcatcacgcaatacagcaccggacaggtcagcgtggaaattgaatgggagctgcagaaggaaaacagcaagcgctggaaccccgagatccagtacacctccaactactacaaatctacaagtgtggactttgctgttaatacagaaggcgtgtactctgaaccccgccccattggcacccgttacctcacccgtaatctgtaa

SEQ ID NO: 3908 - DNA, 2217 bp, Artificial Sequence
  source: /note="Description of Artificial Sequence: Synthetic polynucleotide"
atggctgccgatggttatcttccagattggctcgaggacaacctctctgagggcattcgcgagtggtgggcgctgaaacctggagccccgaagcccaaagccaaccagcaaaagcaggacgacggccggggtctggtgcttcctggctacaagtacctcggacccttcaacggactcgacaagggggagcccgtcaacgcggcggacgcggcggccctcgagcacgacaaggcctacgaccagcagctgcaggcgggtgacaatccgtacctgcggtataaccacgccgacgccgagtttcaggagcgtctgcaagaagatacgtcttttgggggcaacctcgggcgagcagtcttccaggccaagaagcgggttctcgaacctctcggtctggttgaggaaggcgctaagacggctcctggaaagaagagaccggtagagccatcaccccagcgttctccagactcctctacgggcatcggcaagaagggccaacagcccgccagaaaaagactcaattttggtcagactggcgactcagagtcagttccagaccctcaacctctcggagaacctccagcagcgccctctggtgtgggacctaatacaatggctgcaggcggtggcgcaccaatggcagacaataacgaaggcgccgacggagtgggtagttcctcgggaaattggcattgcgattccacatggctgggcgacagagtcatcaccaccagcacccgaacctgggccctgcccacctacaacaaccacctctacaagcaaatctccaacgggacatcgggaggagccaccaacgacaacacctacttcggctacagcaccccctgggggtattttgactttaacagattccactgccacttttcaccacgtgactggcagcgactcatcaacaacaactggggattccggcccaagagactcagcttcaagctcctcaacatccaggtcaaggaggtcacgcagaatgaaggcaccaagaccatcgccaataacctcaccagcaccatccaggtgtttacggactcggagtaccagctgccgtacgttctcggctctgcccaccagggctgcctgcctccgttcccggcggacgtgttcacgattccccagtacggctacctaacactcaacaacggtagtcaggccgtgggacgctcctccttctactgcctggaatactttccttcgcagatgctgagaaccggcaacaacttccagtttacttacaccttcgaggacgtgcctttccacagcagctacgcccacagccagagcttggaccggctgatgaatcctctgattgaccagtacctgtactacttgtctcggattcaaacaacaggaggcacggcaaatacgcagactctgggcttcagccaaggtgggcctaatacaatggccaatcaggcaaagaactggctgccaggaccctgttaccgccaacaacgcgtctcaacgacaaccgggcaaaacaacaatagcaactttgcctggactgctgggaccaaataccatctgaatggaagaaattcattggctaatcctggcatcgctatggcaacacacaaagacgacgaggagcgtttttttcccagtaacgggatcctgatttttggcaaacaaaatgctgccagagacaatgcggattacagcgatgtcatgcccaccagcgaggaagaaatcaaaaccactaaccctgtggccacagaggaatacggtatcgtggcagataacttgcagcagcaaaacacggctcctcaaattggaactgtcaacagccagggggccttacccggtatggtctggcagaaccgggacgtgtacctgcagggtcccatctgggccaagattcctcacacggacggcaacttccacccgtctccgctgatgggcggctttggcctgaaacatcctccgcctcagatcctgatcaagaacacgcctgtacctgcggatcctccgaccaccttcaaccagtcaaagctgaactctttcatcacgcaatacagcaccggacaggtcagcgtggaaattgaatgggagctgcagaaggaaaacagcaagcgctggaaccccgagatccagtacacctccaactactacaaatctacaagtgtggactttgctgttaatacagaaggcgtgtactctgaaccccgccccattggcacccgttacctcacccgtaatctgtaa

SEQ ID NO: 3909 - DNA, 2217 bp, Artificial Sequence
  source: /note="Description of Artificial Sequence: Synthetic polynucleotide"
atggctgccgatggttatcttccagattggctcgaggacaacctctctgagggcattcgcgagtggtgggcgctgaaacctggagccccgaagcccaaagccaaccagcaaaagcaggacgacggccggggtctggtgcttcctggctacaagtacctcggacccttcaacggactcgacaagggggagcccgtcaacgcggcggacgcggcggccctcgagcacgacaaggcctacgaccagcagctgcaggcgggtgacaatccgtacctgcggtataaccacgccgacgccgagtttcaggagcgtctgcaagaagatacgtcttttgggggcaacctcgggcgagcagtcttccaggccaagaagcgggttctcgaacctctcggtctggttgaggaaggcgctaagacggctcctggaaagaagagaccggtagagccatcaccccagcgttctccagactcctctacgggcatcggcaagaagggccaacagcccgccagaaaaagactcaattttggtcagactggcgactcagagtcagttccagaccctcaacctctcggagaacctccagcagcgccctctggtgtgggacctaatacaatggctgcaggcggtggcgcaccaatggcagacaataacgaaggcgccgacggagtgggtagttcctcgggaaattggcattgcgattccacatggctgggcgacagagtcatcaccaccagcacccgaacctgggccctgcccacctacaacaaccacctctacaagcaaatctccaacgggacatcgggaggagccaccaacgacaacacctacttcggctacagcaccccctgggggtattttgactttaacagattccactgccacttttcaccacgtgactggcagcgactcatcaacaacaactggggattccggcccaagagactcagcttcaagctcttcaacatccaggtcaaggaggtcacgcagaatgaaggcaccaagaccatcgccaataacctcaccagcaccatccaggtgtttacggactcggagtaccagctgccgtacgttctcggctctgcccaccagggctgcctgcctccgttcccggcggacgtgttcacgattccccagtacggctacctaacactcaacaacggtagtcaggccgtgggacgctcctccttctactgcctggaatactttccttcgcagatgctgagaaccggcaacaacttccagtttacttacaccttcgaggacgtgcctttccacagcagctacgcccacagccagagcttggaccggctgatgaatcctctgattgaccagtacctgtactacttgtctcggattcaaacaacaggaggcacggcaaatacgcagactctgggcttcagccaaggtgggcctaatacaatggccaatcaggcaaagaactggctgccaggaccctgttaccgccaacaacgcgtctcaacgacaaccgggcaaaacaacaatagcaactttgcctggactgctgggaccaaataccatctgaatggaagaaattcattggctaatcctggcatcgctatggcaacacacaaagacgacgaggagcgtttttttcccagtaacgggatcctgatttttggcaaacaaaatgctgccagagacaatgcggattacagcgatgtcgtgcccaccagcgaggaagaaatcaaaaccactaaccctgtggccacagaggaatacggtatcgtggcagataacttgcagcagcaaaacacggctcctcaaattggaactgtcaacagccagggggccttacccggtatggtctggcagaaccgggacgtgtacctgcagggtcccatctgggccaagattcctcacacggacggcaacttccacccgtctccgctgatgggcggctttggcctgaaacatcctccgcctcagatcctgatcaagaacacgcctgtacctgcggatcctccgaccaccttcaaccagtcaaagctgaactctttcatcacgcaatacagcaccggacaggtcagcgtggaaattgaatgggagctgcagaaggaaaacagcaagcgctggaaccccgagatccagtacacctccaactactacaaatctacaagtgtggactttgctgttaatacagaaggcgtgtactctgaaccccgccccattggcacccgttacctcacccgtaatctgtaa

SEQ ID NO: 3910 - DNA, 2217 bp, Artificial Sequence
  source: /note="Description of Artificial Sequence: Synthetic polynucleotide"
atggctgccgatggttatcttccagattggctcgaggacaacctctctgagggcattcgcgagtggtgggcgctgaaacctggagccccgaagcccaaagccaaccagcaaaagcaggacgacggccggggtctggtgcttcctggctacaagtacctcggacccttcaacggactcgacaagggggagcccgtcaacgcggcggacgcggcggccctcgagcacgacaaggcctacgaccagcagctgcaggcgggtgacaatccgtacctgcggtataaccacgccgacgccgagtttcaggagcgtctgcaagaagatacgtcttttgggggcaacctcgggcgagcagtcttccaggccaagaagcgggttctcgaacctctcggtctggttgaggaaggcgctaagacggctcctggaaagaagagaccggtagagccatcaccccagcgttctccagactcctctacgggcatcggcaagaagggccgacagcccgccagaaaaagactcaattttggtcagactggcgactcagagtcagttccagaccctcaacctctcggagaacctccagcagcgccctctggtgtgggacctaatacaatggctgcaggcggtggcgcaccaatggcagacaataacgaaggcgccgacggagtgggtagttcctcgggaaattggcattgcgattccacatggctgggcgacagagtcatcaccaccagcacccgaacctgggccctgcccacctacaacaaccacctctacaagcaaatctccaacgggacatcgggaggagccaccaacgacaacacctacttcggctacagcaccccctgggggtattttgactttaacagattccactgccacttttcaccacgtgactggcagcgactcatcaacaacaactggggattccggcccaagagactcagcttcaagctcttcaacatccaggtcaaggaggtcacgcagaatgaaggcaccaagaccatcgccaataacctcaccagcaccatccaggtgtttacggactcggagtaccagctgccgtacgttctcggctctgcccaccagggctgcctgcctccgttcccggcggacgtgttcacgattccccagtacggctacctaacactcaacaacggtagtcaggccgtgggacgctcctccttctactgcctggaatactttccttcgcagatgctgagaaccggcaacaacttccagtttacttacaccttcgaggacgtgcctttccacagcagctacgcccacagccagagcttggaccggctgatgaatcctctgattgaccagtacctgtactacttgtctcggattcaaacaacaggaggcacggcaaatacgcagactctgggcttcagccaaggtgggcctaatacaatggccaatcaggcaaagaactggctgccaggaccctgttaccgccaacaacgcgtctcaacgacaaccgggcaaaacaacaatagcaactttgcctggactgctgggaccaaataccatctgaatggaagaaattcattggctaatcctggcatcgctatggcaacacacaaagacgacgaggagcgtttttttcccagtaacgggatcctgatttttggcaaacaaaatgctgccagagacaatgcggattacagcgatgtcatgcccaccagcgaggaagaaatcaaaaccactaaccctgtggccacagaggaatacggtatcgtggcagataacttgcagcagcaaaacacggctcctcaaattggaactgtcaacagccagggggccttacccggtatggtctggcagaaccgggacgtgtacctgcagggtcccatctgggccaagattcctcacacggacggcaacttccacccgtctccgctgatgggcggctttggcctgaaacatcctccgcctcagatcctgatcaagaacacgcctgtacctgcggatcctccgaccaccttcaaccagtcaaagctgaactctttcatcacgcaatacagcaccggacaggtcagcgtggaaattgaatgggagctgcagaaggaaaacagcaagcgctggaaccccgagatccagtacacctccaactactacaaatctacaagtgtggactttgctgttaatacagaaggcgtgtactctgaaccccgccccattggcacccgttacctcacccgtaatctgtaa

SEQ ID NO: 3911 - DNA, 2217 bp, Artificial Sequence
  source: /note="Description of Artificial Sequence: Synthetic polynucleotide"
atggctgccgatggttatcttccagattggctcgaggacaacctctctgagggcattcgcgagtggtgggcgctgaaacctggagccccgaagcccaaagccaaccagcaaaagcaggacgacggccggggtctggtgcttcctggctacaagtacctcggacccttcaacggactcgacaagggggagcccgtcaacgcggcggacgcggcggccctcgagcacgacaaggcctacgaccagcagctgcaggcgggtgacaatccgtacctgcggtataaccacgccgacgccgagtttcaggagcgtctgcaagaagatacgtcttttgggggcaacctcgggcgagcagtcttccaggccaagaagcgggttctcgaacctctcggtctggttgaggaaggcgctaagacggctcctggaaagaagagaccggtagagtcatcaccccagcgttctccagactcctctacgggcatcggcaagaagggccaacagcccgccagaaaaagactcaattttggtcagactggcgactcagagtcagttccagaccctcaacctctcggagaacctccagcagcgccctctggtgtgggacctaatacaatggctgcaggcggtggcgcaccaatggcagacaataacgaaggcgccgacggagtgggtagttcctcgggaaattggcattgcgattccacatggctgggcgacagagtcatcaccaccagcacccgaacctgggccctgcccacctacaacaaccacctctacaagcaaatctccaacgggacatcgggaggagccaccaacgacaacacctacttcggctacagcaccccctgggggtattttgactttaacagattccactgccacttttcaccacgtgactggcagcgactcatcaacaacaactggggattccggcccaagagactcagcttcaagctcttcaacatccaggtcaaggaggtcacgcagaatgaaggcaccaagaccatcgccaataacctcaccagcaccatccaggtgtttacggactcggagtaccagctgccgtacgttctcggctctgcccaccagggctgcctgcctccgttcccggcggacgtgttcacgattccccagtacggctacctaacactcaacaacggtagtcaggccgtgggacgctcctccttctactgcctggaatactttccttcgcagatgctgagaaccggcaacaacttccagtttacttacaccttcgaggacgtgcctttccacagcagctacgcccacagccagagcttggaccggctgatgaatcctctgattgaccagtacctgtactacttgtctcggattcaaacaacaggaggcacggcaaatacgcagactctgggcttcagccaaggtgggcctaatacaatggccaatcaggcaaagaactggctgccaggaccctgttaccgccaacaacgcgtctcaacgacaaccgggcaaaacaacaatagcaactttgcctggactgctgggaccaaataccatctgaatggaagaaattcattggctaatcctggcatcgctatggcaacacacaaagacgacgaggagcgtttttttcccagtaacgggatcctgatttttggcaaacaaaatgctgccagagacaatgcggattacagcgatgtcatgcccaccagcgaggaagaaatcaaaaccactaaccctgtggccacagaggaatacggtatcgtggcagataacttgcagcagcaaaacacggctcctcaaattggaactgtcaacagccagggggccttacccggtatggtctggcagaaccgggacgtgtacctgcagggtcccatctgggccaagattcctcacacggacggcaacttccacccgtctccgctgatgggcggctttggcctgaaacatcctccgcctcagatcctgatcaagaacacgcctgtacctgcggatcctccgaccaccttcaaccagtcaaagctgaactctttcatcacgcaatacagcaccggacaggtcagcgtggaaattgaatgggagctgcagaaggaaaacagcaagcgctggaaccccgagatccagtacacctccaactactacaaatctacaagtgtggactttgctgttaatacagaaggcgtgtactctgaaccccgccccattggcacccgttacctcacccgtaatctgtaa

SEQ ID NO: 3912 - DNA, 2217 bp, Artificial Sequence
  source: /note="Description of Artificial Sequence: Synthetic polynucleotide"
atggctgccgatggttatcttccagattggctcgaggacaacctctctgagggcattcgcgagtggtgggcgctgaaacctggagccccgaagcccaaagccaaccagcaaaagcaggacgacggccggggtctggtgcttcctggctacaagtacctcggacccttcaacggactcgacaagggggagcccgtcaacgcggcggacgcggcggccctcgagcacgacaaggcctacgaccagcagctgcaggcgggtgacaatccgtacctgcggtataaccacgccgacgccgagtttcaggagcgtctgcaagaagatacgtcttttgggggcaacctcgggcgagcagtcttccaggccaagaagcgggttctcgaacctctcggtctggttgaggaaggcgctaagacggctcctggaaagaagagaccggtagagccatcaccccagcgttctccagactcctctacgggcatcggcaagaagggccaacagcccgccagaaaaagactcaattttggtcagactggcgactcagagtcagttccagaccctcaacctctcggagaacctccagcagcgccctctggtgcgggacctaatacaatggctgcaggcggtggcgcaccaatggcagacaataacgaaggcgccgacggagtgggtagttcctcgggaaattggcattgcgattccacatggctgggcgacagagtcatcaccaccagcacccgaacctgggccctgcccacctacaacaaccacctctacaagcaaatctccaacgggacatcgggaggagccaccaacgacaacacctacttcggctacagcaccccctgggggtattttgactttaacagattccactgccacttttcaccacgtgactggcagcgactcatcaacaacaactggggattccggcccaagagactcagcttcaagctcttcaacatccaggtcaaggaggtcacgcagaatgaaggcaccaagaccatcgccaataacctcaccagcaccatccaggtgtttacggactcggagtaccagctgccgtacgttctcggctctgcccaccagggctgcctgcctccgttcccggcggacgtgttcacgattccccagtacggctacctaacactcaacaacggtagtcaggccgtgggacgctcctccttctactgcctggaatactttccttcgcagatgctgagaaccggcaacaacttccagtttacttacaccttcgaggacgtgcctttccacagcagctacgcccacagccagagcttggaccggctgatgaatcctctgattgaccagtacctgtactacttgtctcggattcaaacaacaggaggcacggcaaatacgcagactctgggcttcagccaaggtgggcctaatacaatggccaatcaggcaaagaactggctgccaggaccctgttaccgccaacaacgcgtctcaacgacaaccgggcaaaacaacaatagcaactttgcctggactgctgggaccaaataccatctgaatggaagaaattcattggctaatcctggcatcgctatggcaacacacaaagacgacgaggagcgtttttttcccagtaacgggatcctgatttttggcaaacaaaatgctgccagagacaatgcggattacagcgatgtcatgcccaccagcgaggaagaaatcaaaaccactaaccctgtggccacagaggaatacggtatcgtggcagataacttgcagcagcaaaacacggctcctcaaattggaactgtcaacagccagggggccttacccggtatggtctggcagaaccgggacgtgtacctgcagggtcccatctgggccaagattcctcacacggacggcaacttccacccgtctccgctgatgggcggctttggcctgaaacatcctccgcctcagatcctgatcaagaacacgcctgtacctgcggatcctccgaccaccttcaaccagtcaaagctgaactctttcatcacgcaatacagcaccggacaggtcagcgtggaaattgaatgggagctgcagaaggaaaacagcaagcgctggaaccccgagatccagtacacctccaactactacaaatctacaagtgtggactttgctgttaatacagaaggcgtgtactctgaaccccgccccattggcacccgttacctcacccgtaatctgtaa

SEQ ID NO: 3913 - DNA, 2217 bp, Artificial Sequence
  source: /note="Description of Artificial Sequence: Synthetic polynucleotide"
atggctgccgatggttatcttccagattggctcgaggacaacctctctgagggcattcgcgagtggtgggcgctgaaacctggagccccgaagcccaaagccaaccagcaaaagcaggacgacggccggggtctggtgcttcctggctacaagtacctcggacccttcaacggactcgacaagggggagcccgtcaacgcggcggacgcggcggccctcgagcacgacaaggcctacgaccagcagctgcaggcgggtgacaatccgtacctgcggtataaccacgccgacgccgagtttcaggagcgtctgcaagaagatacgtcttttgggggcaacctcgggcgagcagtcttccaggccaagaagcgggttctcgaacctctcggtctggttgaggaaggcgctaagacggctcctggaaagaagagaccggtagagccatcaccccagcgttctccagactcctctacgggcatcggcaagaagggccaacagcccgccagaaaaagactcaattttggtcagactggcgactcagagtcagttccagaccctcaacctctcggagaacctccagcagcgccctctggtgtgggacctaatacaatggctgcaggcggtggcgcaccaatggcagacaataacgaaggcgccgacggagtgggtagttcctcgggaaattggcattgcgattccacatggctgggcgacagagtcatcaccaccagcacccgaacctgggccctgcccacctacaacaaccacctctacaagcaaatctccaacgggacatcgggaggagccaccaacgacaacacctacttcggctacagcaccccctgggggtattttgactttaacagattccactgccacttttcaccacgtgactggcagcgactcatcaacaacaactggggattccggcccaagagactcagcttcaagctcttcaacatccaggtcaaggaggtcacgcagaatgaaggcaccaagaccatcgccaataacctcaccagcaccatccaggtgtttacggactcggagtaccagctgccgtacgttctcggctctgcccaccagggctgcctgcctccgttcccggcggacgtgttcacgattccccagtacggctacctaacactcaacaacggtagtcaggccgtgggacgctcctccttctactgcctggaatactttccttcgcagatgctgagaaccggcaacaacttccagtttacttacaccttcgaggacgtgcctttccacagcagctacgcccacagccagagcttggaccggctgatgaatcctctgattgaccagtacccgtactacttgtctcggattcaaacaacaggaggcacggcaaatacgcagactctgggcttcagccaaggtgggcctaatacaatggccaatcaggcaaagaactggctgccaggaccctgttaccgccaacaacgcgtctcaacgacaaccgggcaaaacaacaatagcaactttgcctggactgctgggaccaaataccatctgaatggaagaaattcattggctaatcctggcatcgctatggcaacacacaaagacgacgaggagcgtttttttcccagtaacgggatcctgatttttggcaaacaaaatgctgccagagacaatgcggattacagcgatgtcatgcccaccagcgaggaagaaatcaaaaccactaaccctgtggccacagaggaatacggtatcgtggcagataacttgcagcagcaaaacacggctcctcaaattggaactgtcaacagccagggggccttacccggtatggtctggcagaaccgggacgtgtacctgcagggtcccatctgggccaagattcctcacacggacggcaacttccacccgtctccgctgatgggcggctttggcctgaaacatcctccgcctcagatcctgatcaagaacacgcctgtacctgcggatcctccgaccaccttcaaccagtcaaagctgaactctttcatcacgcaatacagcaccggacaggtcagcgtggaaattgaatgggagctgcagaaggaaaacagcaagcgctggaaccccgagatccagtacacctccaactactacaaatctacaagtgtggactttgctgttaatacagaaggcgtgtactctgaaccccgccccattggcacccgttacctcacccgtaatctgtaa

SEQ ID NO: 3914 - DNA, 2217 bp, Artificial Sequence
  source: /note="Description of Artificial Sequence: Synthetic polynucleotide"
atggctgccgatggttatcttccagattggctcgaggacaacctctctgagggcattcgcgagtggtgggcgctgaaacctggagccccgaagcccaaagccaaccagcaaaagcaggacgacggccggggtctggtgcttcctggctacaagtacctcggacccttcaacggactcgacaagggggagcccgtcaacgcggcggacgcggcggccctcgagcacgacaaggcctacgaccagcagctgcaggcgggtgacaatccgtacctgcggtataaccacgccgacgccgagtttcaggagcgtctgcaagaagatacgtcttttgggggcaacctcgggcgagcagtcttccaggccaagaagcgggttctcgaacctctcggtctggttgaggaaggcgctaagacggctcctggaaagaagagaccggtagagccatcaccccagcgttctccagactcctctacgggcatcggcaagaagggccaacagcccgccagaaaaagactcaattttggtcagactggcgactcagagtcagttccagaccctcaacctctcggagaacctccagcagcgccctctggtgtgggacctaatacaatggctgcaggcggtggcgcaccaatggcagacaataacgaaggcgccgacggagtgggtagttcctcgggaaattggcattgcgattccacatggctgggcgacagagtcatcaccaccagcacccgaacctgggccctgcccacctacaacaaccacctctacaagcaaatctccaacgggacatcgggaggagccaccaacgacaacacctacttcggctacagcaccccctgggggtattttgactttaacagattccactgccacttttcaccacgtgactggcagcgactcatcaacaacaactggggattccggcccaagagactcagcttcaagctcttcaacatccaggtcaaggaggtcacgcagaatgaaggcaccaagaccatcgccaataacctcaccagcaccatccaggtgtttacggactcggagtaccagctgccgtacgttctcggctctgcccaccagggctgcctgcctccgttcccggcggacgtgttcacgattccccagtacggctacctaacactcaacaacggtagtcaggccgtgggacgctcctccttctactgcctggaatactttccttcgcagatgctgagaaccggcaacaacttccagtttacttacaccttcgaggacgtgcctttccacagcagctacgcccacagccagagcttggaccggctgatgaatcctctgattgaccagtacctgtactacttgtctcggattcaaacaacaggaggcacggcaaatacgcagactctgggcttcagccaaggtgggcctaatacaatggccaatcaggcaaagaactggctgccaggaccctgttaccgccaacaacgcgtctcaacgacaaccgggcaaagcaacaatagcaactttgcctggactgctgggaccaaataccatctgaatggaagaaattcattggctaatcctggcatcgctatggcaacacacaaagacgacgaggagcgtttttttcccagtaacgggatcctgatttttggcaaacaaaatgctgccagagacaatgcggattacagcgatgtcatgcccaccagcgaggaagaaatcaaaaccactaaccctgtggccacagaggaatacggtatcgtggcagataacttgcagcagcaaaacacggctcctcaaattggaactgtcaacagccagggggccttacccggtatggtctggcagaaccgggacgtgtacctgcagggtcccatctgggccaagattcctcacacggacggcaacttccacccgtctccgctgatgggcggctttggcctgaaacatcctccgcctcagatcctgatcaagaacacgcctgtacctgcggatcctccgaccaccttcaaccagtcaaagctgaactctttcatcacgcaatacagcaccggacaggtcagcgtggaaattgaatgggagctgcagaaggaaaacagcaagcgctggaaccccgagatccagtacacctccaactactacaaatctacaagtgtggactttgctgttaatacagaaggcgtgtactctgaaccccgccccattggcacccgttacctcacccgtaatctgtaa

SEQ ID NO: 3915 - DNA, 2217 bp, Artificial Sequence
  source: /note="Description of Artificial Sequence: Synthetic polynucleotide"
atggctgccgatggttatcttccagattggctcgaggacaacctctctgagggcattcgcgagtggtgggcgctgaaacctggagccccgaagcccaaagccaaccagcaaaagcaggacgacggccggggtctggtgcttcctggctacaagtacctcggacccttcaacggactcgacaagggggagcccgtcaacgcggcggacgcggcggccctcgagcacgacaaggcctacgaccagcagctgcaggcgggtgacaatccgtacctgcggtataaccacgccgacgccgagtttcaggagcgtctgcaagaagatacgtcttttgggggcaacctcgggcgagcagtcttccaggccaagaagcgggttctcgaacctctcggtctggttgaggaaggcgctaagacggctcctggaaagaagagaccggtagagccatcaccccagcgttctccagactcctctacgggcatcggcaagaagggccaacagcccgccagaaaaagactcaattttggtcagactggcgactcagagtcagttccagaccctcaacctctcggagaacctccagcagcgccctctggtgtgggacctaatacaatggctgcaggcggtggcgcaccaatggcagacaataacgaaggcgccgacggagtgggtagttcctcgggaaattggcattgcgattccacatggctgggcgacagagtcatcaccaccagcacccgaacctgggccctgcccacctacaacaaccacctctacaagcaaatctccaacgggacatcgggaggagccaccaacgacaacacctacttcggctacagcaccccctgggggtattttgactttaacagattccactgccacttttcaccacgtgactggcagcgactcatcaacaacaactggggattccggcccaagagactcagcttcaagctcttcaacatccaggtcaaggaggtcacgcagaatgaaggcaccaagaccatcgccaataacctcaccagcaccatccaggtgtttacggactcggagtaccagctgccgtacgttctcggctctgcccaccagggctgcctgcctccgttcccggcggacgtgttcacgattccccagtacggctacctaacactcaacaacggtagtcaggccgtgggacgctcctccttctactgcctggaatactttccttcgcagatgctgagaaccggcaacaacttccagtttacttacaccttcgaggacgtgcctttccacagcagctacgcccacagccagagcttggaccggctgatgaatcctctgattgaccagtacctgtactacttgtctcggattcaaacaacaggaggcacggcaaatacgcagactctgggcttcagccaaggtgggcctaatacaatggccaatcaggcaaagaactggctgccaggaccccgttaccgccaacaacgcgtctcaacgacaaccgggcaaaacaacaatagcaactttgcctggactgctgggaccaaataccatctgaatggaagaaattcattggctaatcctggcatcgctatggcaacacacaaagacgacgaggagcgtttttttcccagtaacgggatcctgatttttggcaaacaaaatgctgccagagacaatgcggattacagcgatgtcatgcccaccagcgaggaagaaatcaaaaccactaaccctgtggccacagaggaatacggtatcgtggcagataacttgcagcagcaaaacacggctcctcaaattggaactgtcaacagccagggggccttacccggtatggtctggcagaaccgggacgtgtacctgcagggtcccatctgggccaagattcctcacacggacggcaacttccacccgtctccgctgatgggcggctttggcctgaaacatcctccgcctcagatcctgatcaagaacacgcctgtacctgcggatcctccgaccaccttcaaccagtcaaagctgaactctttcatcacgcaatacagcaccggacaggtcagcgtggaaattgaatgggagctgcagaaggaaaacagcaagcgctggaaccccgagatccagtacacctccaactactacaaatctacaagtgtggactttgctgttaatacagaaggcgtgtactctgaaccccgccccattggcacccgttacctcacccgtaatctgtaa

SEQ ID NO: 3916 - DNA, 2217 bp, Artificial Sequence
  source: /note="Description of Artificial Sequence: Synthetic polynucleotide"
atggctgccgatggttatcttccagattggctcgaggacaacctctctgagggcattcgcgagtggtgggcgctgaaacctggagccccgaagcccaaagccaaccagcaaaagcaggacgacggccggggtctggtgcttcctggctacaagtacctcggacccttcaacggactcgacaagggggagcccgtcaacgcggcggacgcggcggccctcgagcacgacaaggcctacgaccagcagctgcaggcgggtgacaatccgtacctgcggtataaccacgccgacgccgagtttcaggagcgtctgcaagaagatacgtcttttgggggcaacctcgggcgagcagtcttccaggccaagaagcgggttctcgaacctctcggtctggttgaggaaggcgctaagacggctcctggaaagaagagaccggtagagccatcaccccagcgttctccagactcctctacgggcatcggcaagaagggccaacagcccgccagaaaaagactcaattttggtcagactggcgactcagagtcagttccagaccctcaacctctcggagaacctccagcagcgccctctggtgtgggacctaatacaatggctgcaggcggtggcgcaccaatggcagacaataacgaaggcgccgacggagtgggtagttcctcgggaaattggcattgcgattccacatggctgggcgacagagtcatcaccaccagcacccgaacctgggccctgcccacctacaacaaccacctctacaagcaaatctccaacgggacatcgggaggagccaccaacgacaacacctacttcggctacagcaccccctgggggtattttgactttaacagattccactgccacttttcaccacgtgactggcagcgactcatcaacaacaactggggattccggcccaagagactcagcttcaagctcttcaacatccaggtcaaggaggtcacgcagaatgaaggcaccaagaccatcgccaataacctcaccagcaccatccaggtgtttacggactcggagtaccagctgccgtacgttctcggctctgcccaccagggctgcctgcctccgttcccggcggacgtgttcacgattccccagtacggctacctaacactcaacaacggtagtcaggccgtgggacgctcctccttctactgcctggaatactttccttcgcagatgctgagaaccggcaacaacttccagtttacttacaccttcgaggacgtgcctttccacagcagctacgcccacagccagagcttggaccggctgatgaatcctctgattgaccagtacctgtactacttgtctcggattcaaacaacaggaggcacggcaaatacgcagactctgggcttcagccaaggtgggcctaatacaatggccaatcaggcaaagaactggctgccaggaccctgttaccgccaacaacgcgtctcaacgacaaccgggcaaaacaacaatagcaactttgcctggactgctgggaccaaataccatctgaatggaagaaattcattggctaatcctggcatcgctatggcaacacacaaagacgacgaggagcgtttttttcccagtaacgggatcctgatttttggcaaacaaaatgctgccagagacaatgcggattacagcgatgtcatgcccaccagcgaggaagaaatcaaaaccactaaccctgtggccacagaggaatacggtatcgtggcagataacttgcagcagcaaaacacggctcctcaaattggaactgtcaacagccagggggccttacccggtatggtctggcagaaccgggacgtgtacctgcagggtcccatctgggccaagattcctcacacggacggcaacttccacccgtctccgctgatgggcggctttggcctgaaacatcctccgcctcagatcctgatcaagaacgcgcctgtacctgcggatcctccgaccaccttcaaccagtcaaagctgaactctttcatcacgcaatacagcaccggacaggtcagcgtggaaattgaatgggagctgcagaaggaaaacagcaagcgctggaaccccgagatccagtacacctccaactactacaaatctacaagtgtggactttgctgttaatacagaaggcgtgtactctgaaccccgccccattggcacccgttacctcacccgtaatctgtaa

SEQ ID NO: 3917 - DNA, 2217 bp, Artificial Sequence
  source: /note="Description of Artificial Sequence: Synthetic polynucleotide"
atggctgccgatggttatcttccagattggctcgaggacaacctctctgagggcattcgcgagtggtgggcgctgaaacctggagccccgaagcccaaagccaaccagcaaaagcaggacgacggccggggtctggtgcttcctggctacaagtacctcggacccttcaacggactcgacaagggggagcccgtcaacgcggcggacgcggcggccctcgagcacgacaaggcctacgaccagcagctgcaggcgggtgacaatccgtacctgcggtataaccacgccgacgccgagtttcaggagcgtctgcaagaagatacgtcttttgggggcaacctcgggcgagcagtcttccaggccaagaagcgggttctcgaacctctcggtctggttgaggaaggcgctaagacggctcctggaaagaagagaccggtagagccatcaccccagcgttctccagactcctctacgggcatcggcaagaagggccaacagcccgccagaaaaagactcaattttggtcagactggcgactcagagtcagttccagaccctcaacctctcggagaacctccagcagcgccctctggtgtgggacctaatacaatggctgcaggcggtggcgcaccaatggcagacaataacgaaggcgccgacggagtgggtagttcctcgggaaattggcattgcgattccacatggctgggcgacagagtcatcaccaccagcacccgaacctgggccctgcccacctacaacaaccacctctacaagcaaatctccaacgggacatcgggaggagccaccaacgacaacacctacttcggctacagcaccccctgggggtattttgactttaacagattccactgccacttttcaccacgtgaccggcagcgactcatcaacaacaactggggattccggcccaagagactcagcttcaagctcttcaacatccaggtcaaggaggtcacgcagaatgaaggcaccaagaccatcgccaataacctcaccagcaccatccaggtgtttacggactcggagtaccagctgccgtacgttctcggctctgcccaccagggctgcctgcctccgttcccggcggacgtgttcacgattccccagtacggctacctaacactcaacaacggtagtcaggccgtgggacgctcctccttctactgcctggaatactttccttcgcagatgctgagaaccggcaacaacttccagtttacttacaccttcgaggacgtgcctttccacagcagctacgcccacagccagagcttggaccggctgatgaatcctctgattgaccagtacctgtactacttgtctcggattcaaacaacaggaggcacggcaaatacgcagactctgggcttcagccaaggtgggcctaatacaatggccaatcaggcaaagaactggctgccaggaccctgttaccgccaacaacgcgtctcaacgacaaccgggcaaaacaacaatagcaactttgcctggactgctgggaccaaataccatctgaatggaagaaattcattggctaatcctggcatcgctatggcaacacacaaagacgacgaggagcgtttttttcccagtaacgggatcctgatttttggcaaacaaaatgctgccagagacaatgcggattacagcgatgtcatgcccaccagcgaggaagaaatcaaaaccactaaccctgtggccacagaggaatacggtatcgtggcagataacttgcagcagcaaaacacggctcctcaaattggaactgtcaacagccagggggccttacccggtatggtctggcagaaccgggacgtgtacctgcagggtcccatctgggccaagattcctcacacggacggcaacttccacccgtctccgctgatgggcggctttggcctgaaacatcctccgcctcagatcctgatcaagaacacgcctgtacctgcggatcctccgaccaccttcaaccagtcaaagctgaactctttcatcacgcaatacagcaccggacaggtcagcgtggaaattgaatgggagctgcagaaggaaaacagcaagcgctggaaccccgagatccagtacacctccaactactacaaatctacaagtgtggactttgctgttaatacagaaggcgtgtactctgaaccccgccccattggcacccgttacctcacccgtaatctgtaa

SEQ ID NO: 3918 - DNA, 2217 bp, Artificial Sequence
  source: /note="Description of Artificial Sequence: Synthetic polynucleotide"
atggctgccgatggttatcttccagattggctcgaggacaacctctctgagggcattcgcgagtggtgggcgctgaaacctggagccccgaagcccaaagccaaccagcaaaagcaggacgacggccggggtctggtgcttcctggctacaagtacctcggacccttcaacggactcgacaagggggagcccgtcaacgcggcggacgcggcggccctcgagcacgacaaggcctacgaccagcagctgcaggcgggtgacaatccgtacctgcggtataaccacgccgacgccgagtttcaggagcgtctgcaagaagatacgtcttttgggggcaacctcgggcgagcagtcttccaggccaagaagcgggttctcgaacctctcggtctggttgaggaaggcgctaagacggctcctggaaagaagagaccggtagagccatcaccccagcgttctccagactcctctacgggcatcggcaagaagggccaacagcccgccagaaaaagactcaattttggtcagactggcgactcagagtcagttccagaccctcaacctctcggagaacctccagcagcgccctctggtgtgggacctaatacaatggctgcaggcggtggcgcaccaatggcagacaataacgaaggcgccgacggagtgggtagttcctcgggaaattggcattgcgattccacatggctgggcgacagagtcatcaccaccagcacccgaacctgggccctgcccacctacaacaaccacctctacaagcaaatctccaacgggacatcgggaggagccaccaacgacaacacctacttcggctacagcaccccctgggggtattttgactttaacagattccactgccacttttcaccacgtgactggcagcgactcatcaacaacaactggggattccggcccaagagactcagcttcaagctcttcaacatccaggtcaaggaggtcacgcagaatgaaggcaccaagaccatcgccaataacctcaccagcaccatccaggtgtttacggactcggagtaccagctgccgtacgttctcggctctgcccaccagggctgcctgcctccgttcccggcggacgtgttcacgattccccagtacggctacctaacactcaacaacggtagtcaggccgtgggacgctcctccttctactgcctggaatactttccttcgcagatgctgagaaccggcaacaacttccagtttacttacaccttcgaggacgtgcctttccacagcagctacgcccacagccagagcttggaccggctgatgaatcctctgattgaccagtacctgtactacttgtctcggattcaaacaacaggaggcacggcaaatacgcagactctgggcttcagccaaggtgggcctaatacaatggccaatcaggcaaagaactggctgccaggaccctgttaccgccaacaacgcgtctcaacgacaaccgggcaaaacaacaatagcaactttgcctggactgctgggaccaaataccatctgaatggaagaaattcattggctaatcctggcatcgctatggcaacacacaaagacgacgaggagcgtttttttcccagtaacgggatcctgatttttggcaaacaaaatgctgccagagacaatgcggattacagcgatgtcatgcccaccagcgaggaagaaatcaaaaccactaaccctgtggccacagaggaatacggtatcgtggcagataacttgcagcagcaaaacacggctcctcaaattggaactgtcaacagccagggggccttacccggtatggtctggcagaaccgggacgtgtacctgcagggtcccatctgggccaagattcctcacacggacggcagcttccacccgtctccgctgatgggcggctttggcctgaaacatcctccgcctcagatcctgatcaagaacacgcctgtacctgcggatcctccgaccaccttcaaccagtcaaagctgaactctttcatcacgcaatacagcaccggacaggtcagcgtggaaattgaatgggagctgcagaaggaaaacagcaagcgctggaaccccgagatccagtacacctccaactactacaaatctacaagtgtggactttgctgttaatacagaaggcgtgtactctgaaccccgccccattggcacccgttacctcacccgtaatctgtaa

SEQ ID NO: 3919 - DNA, 2217 bp, Artificial Sequence
  source: /note="Description of Artificial Sequence: Synthetic polynucleotide"
atggctgccgatggttatcttccagattggctcgaggacaacctctctgagggcattcgcgagtggtgggcgctgaaacctggagccccgaagcccaaagccaaccagcaaaagcaggacgacggccggggtctggtgcttcctggctacaagtacctcggacccttcaacggactcgacaagggggagcccgtcaacgcggcggacgcggcggccctcgagcacgacaaggcctacgaccagcagctgcaggcgggtgacaatccgtacctgcggtataaccacgccgacgccgagtttcaggagcgtctgcaagaagatacgtcttttgggggcaacctcgggcgagcagtcttccaggccaagaagcgggttctcgaacctctcggtctggttgaggaaggcgctaagacggctcctggaaagaagagaccggtagagccatcaccccagcgttctccagactcctctacgggcatcggcaagaagggccaacagcccgccagaaaaagactcaattttggtcagactggcgactcagagtcagttccagaccctcaacctctcggagaacctccaacagcgccctctggtgtgggacctaatacaatggctgcaggcggtggcgcaccaatggcagacaataacgaaggcgccgacggagtgggtagttcctcgggaaattggcattgcgattccacatggctgggcgacagagtcatcaccaccagcacccgaacctgggccctgcccacctacaacaaccacctctacaagcaaatctccaacgggacatcgggaggagccaccaacgacaacacctacttcggctacagcaccccctgggggtattttgactttaacagattccactgccacttttcaccacgtgactggcagcgactcatcaacaacaactggggattccggcccaagagactcagcttcaagctcttcaacatccaggtcaaggaggtcacgcagaatgaaggcaccaagaccatcgccaataacctcaccagcaccatccaggtgtttacggactcggagtaccagctgccgtacgttctcggctctgcccaccagggctgcctgcctccgttcccggcggacgtgttcacgattccccagtacggctacctaacactcaacaacggtagtcaggccgtgggacgctcctccttctactgcctggaatactttccttcgcagatgctgagaaccggcaacaacttccagtttacttacaccttcgaggacgtgcctttccacagcagctacgcccacagccagagcttggaccggctgatgaatcctctgattgaccagtacctgtactacttgtctcggattcaaacaacaggaggcacggcaaatacgcagactctgggcttcagccaaggtgggcctaatacaatggccaatcaggcaaagaactggctgccaggaccctgttaccgccaacaacgcgtctcaacgacaaccgggcaaaacaacaatagcaactttgcctggactgctgggaccaaataccatctgaatggaagaaattcattggctaatcctggcatcgctatggcaacacacaaagacgacgaggagcgtttttttcccagtaacgggatcctgatttttggcaaacaaaatgctgccagagacaatgcggattacagcgatgtcatgcccaccagcgaggaagaaatcaaaaccactaaccctgtggccacagaggaatacggtatcgtggcagataacttgcagcagcaaaacacggctcctcaaattggaactgtcaacagccagggggccttacccggtatggtctggcagaaccgggacgtgtacctgcagggtcccatctgggccaagattcctcacacggacggcaacttccacccgtctccgctgatgggcggctttggcctgaaacatcctccgcctcagatcctgatcaagaacacgcctgtacctgcggatcctccgaccaccttcaaccagtcaaagctgaactctttcatcacgcaatacagcaccggacaggtcagcgtggaaattgaatgggagctgcagaaggaaaacagcaagcgctggaaccccgagatccagtacacctccaactactacaaatctacaagtgtggactttgctgttaatacagaaggcgtgtactctgaaccccgccccattggcacccgttacctcacccgtaatctgtaa

SEQ ID NO: 3920 - DNA, 2217 bp, Artificial Sequence
  source: /note="Description of Artificial Sequence: Synthetic polynucleotide"
atggctgccgatggttatcttccagattggctcgaggacaacctctctgagggcattcgcgagtggtgggcgctgaaacctggagccccgaagcccaaagccaaccagcaaaagcaggacgacggccggggtctggtgcttcctggctacaagtacctcggacccttcaacggactcgacaagggggagcccgtcaacgcggcggacgcggcggccctcgagcacgacaaggcctacgaccagcagctgcaggcgggtgacaatccgtacctgcggtataaccacgccgacgccgagtttcaggagcgtctgcaagaagatacgtcttttgggggcaacctcgggcgagcagtcttccaggccaagaagcgggttctcgaacctctcggtctggttgaggaaggcgctaagacggctcctggaaagaagagaccggtagagccatcaccccagcgttctccagactcctctacgggcatcggcaagaagggccaacagcccgccagaaaaagactcaattttggtcagactggcgactcagagtcagttccagaccctcaacctctcggagaacctccagcagcgccctctggtgtgggacctaatacaatggctgcaggcggtggcgcaccaatggcagacaataacgaaggcgccgacggagtgggtagttcctcgggaaattggcattgcgattccacatggctgggcgacagagtcatcaccaccagcacccgaacctgggccctgcccacctacaacaaccacctctacaagcaaatctccaacgggacatcgggaggagccaccaacgacaacacctacttcggctacagcaccccctgggggtattttgactttaacagattccactgccacttttcaccacgtgactggcagcgactcatcaacaacaactggggattccggcccaagagactcagcttcaagctcttcaacatccaggtcaaggaggtcacgcagaatgaaggcaccaagaccatcgccaataacctcaccagcaccatccaggtgtttacggactcggagtaccagctgccgtacgttctcggctctgcccaccagggctgcctgcctccgttcccggcggacgtgttcacgattccccagtacggctacctaacactcaacaacggtagtcaggccgtgggacgctcctccttctactgcctggaatactttccttcgcagatgctgagaaccggcaacaacttccagtttacttacaccttcgaggacgtgcctttccacagcagctacgcccacagccagagcttggaccggctgatgaatcctctgattgaccagtacctgtactacttgtctcggattcaaacaacaggaggcacggcaaatacgcagactctgggcttcagccaaggtgggcctaatacaatggccaatcaggcaaagaactggctgccaggaccctgttaccgccaacaacgcgtctcaacgacaaccgggcaaaacaacaatagcaactttgcctggactgctgggaccaaataccatctgaatggaagaaattcattggctaatcctggcatcgctatggcaacacacaaagacgacgaggagcgtttttttcccagtaacgggatcctgatttttggcaaacaaaatgctgccagagacaatgcggattacagcgatgtcatgcccaccagcgaggaagaaatcaaaaccactaaccctgtggccacagaggaatacggtatcgtggcagataacttgcagcagcaaaacacggctcctcaaattggaactgtcaacagccagggggccttacccggtatggtctggcagaaccgggacgtgtacctgcagggtcccatctgggccaagattcctcacacggacggcaacttccacccgtctccgctgatgggcggctttggcctgaaacatcctccgcctcagatcctgatcaagaacacgcctgtacctgcggatcctccgaccaccttcaaccagtcaaagctgaactctttcatcacgcaatacagcaccggacaggtcagcgtggaaattgaatgggagctgcagaaggaaaacagcaagcgctggaaccccgagatccagtacacctccaactactacaaatctacaagtgtggactttgctgttaatgcagaaggcgtgtactctgaaccccgccccattggcacccgttacctcacccgtaatctgtaa

SEQ ID NO: 3921 - DNA, 2217 bp, Artificial Sequence
  source: /note="Description of Artificial Sequence: Synthetic polynucleotide"
atggctgccgatggttatcttccagattggctcgaggacaacctctctgagggcattcgcgagtggtgggcgctgaaacctggagccccgaagcccaaagccaaccagcaaaagcaggacgacggccggggtctggtgcttcctggctacaagtacctcggacccttcaacggactcgacaagggggagcccgtcaacgcggcggacgcggcggccctcgagcacgacaaggcctacgaccagcagctgcaggcgggtgacaatccgtacctgcggtataaccacgccgacgccgagtttcaggagcgtctgcaagaagatacgtcttttgggggcaacctcgggcgagcagtcttccaggccaagaagcgggttctcgaacctctcggtctggttgaggaaggcgctaagacggctcctggaaagaagagaccggtagagccatcaccccagcgttctccagactcctctacgggcatcggcaagaagggccaacagcccgccagaaaaagactcaattttggtcagactggcgactcagagtcagttccagaccctcaacctctcggagaacctccagcagcgccctctggtgtgggacctaatacaatggctgcaggcggtggcgcaccaatggcagacaataacgaaggcgccgacggagcgggtagttcctcgggaaattggcattgcgattccacatggctgggcgacagagtcatcaccaccagcacccgaacctgggccctgcccacctacaacaaccacctctacaagcaaatctccaacgggacatcgggaggagccaccaacgacaacacctacttcggctacagcaccccctgggggtattttgactttaacagattccactgccacttttcaccacgtgactggcagcgactcatcaacaacaactggggattccggcccaagagactcagcttcaagctcttcaacatccaggtcaaggaggtcacgcagaatgaaggcaccaagaccatcgccaataacctcaccagcaccatccaggtgtttacggactcggagtaccagctgccgtacgttctcggctctgcccaccagggctgcctgcctccgttcccggcggacgtgttcacgattccccagtacggctacctaacactcaacaacggtagtcaggccgtgggacgctcctccttctactgcctggaatactttccttcgcagatgctgagaaccggcaacaacttccagtttacttacaccttcgaggacgtgcctttccacagcagctacgcccacagccagagcttggaccggctgatgaatcctctgattgaccagtacctgtactacttgtctcggattcaaacaacaggaggcacggcaaatacgcagactctgggcttcagccaaggtgggcctaatacaatggccaatcaggcaaagaactggctgccaggaccctgttaccgccaacaacgcgtctcaacgacaaccgggcaaaacaacaatagcaactttgcctggactgctgggaccaaataccatctgaatggaagaaattcattggctaatcctggcatcgctatggcaacacacaaagacgacgaggagcgtttttttcccagtaacgggatcctgatttttggcaaacaaaatgctgccagagacaatgcggattacagcgatgtcatgcccaccagcgaggaagaaatcaaaaccactaaccctgtggccacagaggaatacggtatcgtggcagataacttgcagcagcaaaacacggctcctcaaattggaactgtcaacagccagggggccttacccggtatggtctggcagaaccgggacgtgtacctgcagggtcccatctgggccaagattcctcacacggacggcaacttccacccgtctccgctgatgggcggctttggcctgaaacatcctccgcctcagatcctgatcaagaacacgcctgtacctgcggatcctccgaccaccttcaaccagtcaaagctgaactctttcatcacgcaatacagcaccggacaggtcagcgtggaaattgaatgggagctgcagaaggaaaacagcaagcgctggaaccccgagatccagtacacctccaactactacaaatctacaagtgtggactttgctgttaatacagaaggcgtgtactctgaaccccgccccattggcacccgttacctcacccgtaatctgtaa

SEQ ID NO: 3922 - DNA, 2217 bp, Artificial Sequence
  source: /note="Description of Artificial Sequence: Synthetic polynucleotide"
atggctgccgatggttatcttccagattggctcgaggacaacctctctgagggcattcgcgagtggtgggcgctgaaacctggagccccgaagcccaaagccaaccagcaaaagcaggacgacggccggggtctggtgcttcctggctacaagtacctcggacccttcaacggactcgacaagggggagcccgtcaacgcggcggacgcggcggccctcgagcacgacaaggcctacgaccagcagctgcaggcgggtgacaatccgtacctgcggtataaccacgccgacgccgagtttcaggagcgtctgcaagaagatacgtcttttgggggcaacctcgggcgagcagtcttccaggccaagaagcgggttctcgaacctctcggtctggttgaggaaggcgctaagacggctcctggaaagaagagaccggtagagccatcaccccagcgttctccagactcctctacgggcatcggcaagaagggccaacagcccgccagaaaaagactcaattttggtcagactggcgactcagagtcagttccagaccctcaacctctcggagaacctccagcagcgccctctggtgtgggacctaatacaatggctgcaggcggtggcgcaccaatggcagacaataacgaaggcgccgacggagtgggtagttcctcgggaaattggcattgcgattccacatggctgggcgacagagccatcaccaccagcacccgaacctgggccctgcccacctacaacaaccacctctacaagcaaatctccaacgggacatcgggaggagccaccaacgacaacacctacttcggctacagcaccccctgggggtattttgactttaacagattccactgccacttttcaccacgtgactggcagcgactcatcaacaacaactggggattccggcccaagagactcagcttcaagctcttcaacatccaggtcaaggaggtcacgcagaatgaaggcaccaagaccatcgccaataacctcaccagcaccatccaggtgtttacggactcggagtaccagctgccgtacgttctcggctctgcccaccagggctgcctgcctccgttcccggcggacgtgttcacgattccccagtacggctacctaacactcaacaacggtagtcaggccgtgggacgctcctccttctactgcctggaatactttccttcgcagatgctgagaaccggcaacaacttccagtttacttacaccttcgaggacgtgcctttccacagcagctacgcccacagccagagcttggaccggctgatgaatcctctgattgaccagtacctgtactacttgtctcggattcaaacaacaggaggcacggcaaatacgcagactctgggcttcagccaaggtgggcctaatacaatggccaatcaggcaaagaactggctgccaggaccctgttaccgccaacaacgcgtctcaacgacaaccgggcaaaacaacaatagcaactttgcctggactgctgggaccaaataccatctgaatggaagaaattcattggctaatcctggcatcgctatggcaacacacaaagacgacgaggagcgtttttttcccagtaacgggatcctgatttttggcaaacaaaatgctgccagagacaatgcggattacagcgatgtcatgcccaccagcgaggaagaaatcaaaaccactaaccctgtggccacagaggaatacggtatcgtggcagataacttgcagcagcaaaacacggctcctcaaattggaactgtcaacagccagggggccttacccggtatggtctggcagaaccgggacgtgtacctgcagggtcccatctgggccaagattcctcacacggacggcaacttccacccgtctccgctgatgggcggctttggcctgaaacatcctccgcctcagatcctgatcaagaacacgcctgtacctgcggatcctccgaccaccttcaaccagtcaaagctgaactctttcatcacgcaatacagcaccggacaggtcagcgtggaaattgaatgggagctgcagaaggaaaacagcaagcgctggaaccccgagatccagtacacctccaactactacaaatctacaagtgtggactttgctgttaatacagaaggcgtgtactctgaaccccgccccattggcacccgttacctcacccgtaatctgtaa

SEQ ID NO: 3923 - DNA, 2217 bp, Artificial Sequence
  source: /note="Description of Artificial Sequence: Synthetic polynucleotide"
atggctgccgatggttatcttccagattggctcgaggacaacctctctgagggcattcgcgagtggtgggcgctgaaacctggagccccgaagcccaaagccaaccagcaaaagcaggacgacggccggggtctggtgcttcctggctacaagtacctcggacccttcaacggactcgacaagggggagcccgtcaacgcggcggacgcggcggccctcgagcacgacaaggcctacgaccagcagctgcaggcgggtgacaatccgtacctgcggtataaccacgccgacgccgagtttcaggagcgtctgcaagaagatacgtcttttgggggcaacctcgggcgagcagtcttccaggccaagaagcgggttctcgaacctctcggtctggttgaggaaggcgctaagacggctcctggaaagaagagaccggtagagccatcaccccagcgttctccagactcctctacgggcatcggcaagaagggccaacagcccgccagaaaaagactcaattttggtcagactggcgactcagagtcagttccagaccctcaacctctcggagaacctccagcagcgccctctggtgtgggacctaatacaatggctgcaggcggtggcgcaccaatggcagacaataacgaaggcgccgacggagtgggtagttcctcgggaaattggcattgcgattccacatggctgggcgacagagtcatcaccaccagcacccgaacctgggccctgcccacctacaacaaccacctctacaagcaaatctccaacgggacatcgggaggagccaccaacgacaacacctacttcggctacagcaccccctgggggtattttgactttaacagattccactgccacttttcaccacgtgactggcagcgactcatcaacaacaactggggattccggcccaagagactcagcttcaagctcttcaacatccaggtcaaggaggtcacgcagaatgaaggcaccaagaccatcgccaataacctcaccagcaccatccaggtgtttacggactcggagtaccagctgccgtacgttctcggctctgcccaccagggctgcctgcctccgttcccggcggacgtgttcacgattccccagtacggctacctaacactcaacaacggtagtcaggccgtgggacgctcctccttctactgcctggaatactttccttcgcagatgctgagaaccggcaacaacttccagtttacttacaccttcgaggacgtgcctttccacagcagctacgcccacagccagagcttggaccggctgatgaatcctctgattgaccagtacctgtactacttgtctcggattcaaacaacaggaggcacggcaaatacgcagactctgggcttcagccaaggtgggcctaatacaatggccaatcaggcaaagaactggctgccaggaccctgttaccgccaacaacgcgtctcaacgacaaccgggcaaaacaacaatagcaactttgcctggactgctgggaccaaataccatctgaatggaagaaattcattggctaatcctggcgtcgctatggcaacacacaaagacgacgaggagcgtttttttcccagtaacgggatcctgatttttggcaaacaaaatgctgccagagacaatgcggattacagcgatgtcatgcccaccagcgaggaagaaatcaaaaccactaaccctgtggccacagaggaatacggtatcgtggcagataacttgcagcagcaaaacacggctcctcaaattggaactgtcaacagccagggggccttacccggtatggtctggcagaaccgggacgtgtacctgcagggtcccatctgggccaagattcctcacacggacggcaacttccacccgtctccgctgatgggcggctttggcctgaaacatcctccgcctcagatcctgatcaagaacacgcctgtacctgcggatcctccgaccaccttcaaccagtcaaagctgaactctttcatcacgcaatacagcaccggacaggtcagcgtggaaattgaatgggagctgcagaaggaaaacagcaagcgctggaaccccgagatccagtacacctccaactactacaaatctacaagtgtggactttgctgttaatacagaaggcgtgtactctgaaccccgccccattggcacccgttacctcacccgtaatctgtaa

SEQ ID NO: 3924 - DNA, 2217 bp, Artificial Sequence
  source: /note="Description of Artificial Sequence: Synthetic polynucleotide"
atggctgccgatggttatcttccagattggctcgaggacaacctctctgagggcattcgcgagtggtgggcgctgaaacctggagccccgaagcccaaagccaaccagcaaaagcaggacgacggccggggtctggtgcttcctggctacaagtacctcggacccttcaacggactcgacaagggggagcccgtcaacgcggcggacgcggcggccctcgagcacgacaaggcctacgaccagcagctgcaggcgggtgacaatccgtacctgcggtataaccacgccgacgccgagtttcaggagcgtctgcaagaagatacgtcttttgggggcaacctcgggcgagcagtcttccaggccaagaagcgggttctcgaacctctcggtctggttgaggaaggcgctaagacggctcctggaaagaagagaccggtagagccatcaccccagcgttctccagactcctctacgggcatcggcaagaagggccaacagcccgccagaaaaagactcaattttggtcagactggcgactcagagtcagttccagaccctcaacctctcggagaacctccagcagcgccctctggtgtgggacctaatacaatggctgcaggcggtggcgcaccaatggcagacaataacgaaggcgccgacggagtgggtagttcctcgggaaattggcattgcgattccacatggctgggcgacagagtcatcaccaccagcacccgaacctgggccctgcccacctacaacaaccacctctacaagcaaatctccaacgggacatcgggaggagccaccaacgacaacacctacttcggctacagcaccccctgggggtattttgactttaacagattccactgccacttttcaccacgtgactggcagcgactcatcaacaacaactggggattccggcccaagagactcagcttcaagctcttcaacatccaggtcaaggaggtcacgcagaatgaaggcaccaagaccatcgccaataacctcaccggcaccatccaggtgtttacggactcggagtaccagctgccgtacgttctcggctctgcccaccagggctgcctgcctccgttcccggcggacgtgttcacgattccccagtacggctacctaacactcaacaacggtagtcaggccgtgggacgctcctccttctactgcctggaatactttccttcgcagatgctgagaaccggcaacaacttccagtttacttacaccttcgaggacgtgcctttccacagcagctacgcccacagccagagcttggaccggctgatgaatcctctgattgaccagtacctgtactacttgtctcggattcaaacaacaggaggcacggcaaatacgcagactctgggcttcagccaaggtgggcctaatacaatggccaatcaggcaaagaactggctgccaggaccctgttaccgccaacaacgcgtctcaacgacaaccgggcaaaacaacaatagcaactttgcctggactgctgggaccaaataccatctgaatggaagaaattcattggctaatcctggcatcgctatggcaacacacaaagacgacgaggagcgtttttttcccagtaacgggatcctgatttttggcaaacaaaatgctgccagagacaatgcggattacagcgatgtcatgcccaccagcgaggaagaaatcaaaaccactaaccctgtggccacagaggaatacggtatcgtggcagataacttgcagcagcaaaacacggctcctcaaattggaactgtcaacagccagggggccttacccggtatggtctggcagaaccgggacgtgtacctgcagggtcccatctgggccaagattcctcacacggacggcaacttccacccgtctccgctgatgggcggctttggcctgaaacatcctccgcctcagatcctgatcaagaacacgcctgtacctgcggatcctccgaccaccttcaaccagtcaaagctgaactctttcatcacgcaatacagcaccggacaggtcagcgtggaaattgaatgggagctgcagaaggaaaacagcaagcgctggaaccccgagatccagtacacctccaactactacaaatctacaagtgtggactttgctgttaatacagaaggcgtgtactctgaaccccgccccattggcacccgttacctcacccgtaatctgtaa

SEQ ID NO: 3925 - DNA, 2217 bp, Artificial Sequence
  source: /note="Description of Artificial Sequence: Synthetic polynucleotide"
atggctgccgatggttatcttccagattggctcgaggacaacctctctgagggcattcgcgagtggtgggcgctgaaacctggagccccgaagcccaaagccaaccagcaaaagcaggacgacggccggggtctggtgcttcctggctacaagtacctcggacccttcaacggactcgacaagggggagcccgtcaacgcggcggacgcggcggccctcgagcacgacaaggcctacgaccagcagctgcaggcgggtgacaatccgtacctgcggtataaccacgccgacgccgagtttcaggagcgtctgcaagaagatacgtcttttgggggcaacctcgggcgagcagtcttccaggccaagaagcgggttctcgaacctctcggtctggttgaggaaggcgctaagacggctcctggaaagaagagaccggtagagccatcaccccagcgttctccagactcctctacgggcatcggcaagaagggccaacagcccgccagaaaaagactcaattttggtcagactggcgactcagagtcagttccagaccctcaacctctcggagaacctccagcagcgccctctggtgtgggacctaatacaatggctgcaggcggtggcgcaccaatggcagacaataacgaaggcgccgacggagtgggtagttcctcgggaaattggcattgcgattccacatggctgggcgacagagtcatcaccaccagcacccgaacctgggccctgcccacctacaacaaccacctctacaagcaaatctccaacgggacatcgggaggagccaccaacgacaacacctacttcggctacagcaccccctgggggtattttgactttaacagattccactgccacttttcaccacgtgactggcagcgactcatcaacaacaactggggattccggcccaagagactcagcttcaagctcttcaacatccaggtcaaggaggtcacgcagaatgaaggcaccaagaccatcgccaataacctcaccagcaccatccaggtgtttacggactcggagtaccagctgccgtacgttctcggctctgcccaccagggctgcctgcctccgttcccggcggacgtgttcacgattccccagtacggctacctaacactcaacaacggtagtcaggccgtgggacgctcctccttctactgcctggaatactttccttcgcagatgctgagaaccggcaacaacttccagtttacttacaccttcgaggacgtgcctttccacagcagctacgcccacagccagagcttggaccggctgatgaatcctctgattgaccagtacctgtactacttgtctcggattcaaacaacaggaggcacggcaaatacgcagactctgggcttcagccaaggtgggcctaatacaatggccaatcaggcaaagaactggctgccaggaccctgttaccgccaacaacgcgtctcaacgacaaccgggcaaaacaacaatagcaactttgcctggactgctgggaccaaataccatctgaatggaagaaattcattggctaatcctggcatcgctatggcaacacacaaagacgacgaggagcgtttttttcccagtaacgggatcctgatttttggcaaacaaaatgctgtcagagacaatgcggattacagcgatgtcatgcccaccagcgaggaagaaatcaaaaccactaaccctgtggccacagaggaatacggtatcgtggcagataacttgcagcagcaaaacacggctcctcaaattggaactgtcaacagccagggggccttacccggtatggtctggcagaaccgggacgtgtacctgcagggtcccatctgggccaagattcctcacacggacggcaacttccacccgtctccgctgatgggcggctttggcctgaaacatcctccgcctcagatcctgatcaagaacacgcctgtacctgcggatcctccgaccaccttcaaccagtcaaagctgaactctttcatcacgcaatacagcaccggacaggtcagcgtggaaattgaatgggagctgcagaaggaaaacagcaagcgctggaaccccgagatccagtacacctccaactactacaaatctacaagtgtggactttgctgttaatacagaaggcgtgtactctgaaccccgccccattggcacccgttacctcacccgtaatctgtaa

SEQ ID NO: 3926 - DNA, 2217 bp, Artificial Sequence
  source: /note="Description of Artificial Sequence: Synthetic polynucleotide"
atggctgccgatggttatcttccagattggctcgaggacaacctctctgagggcattcgcgagtggtgggcgctgaaacctggagccccgaagcccaaagccaaccagcaaaagcaggacgacggccggggtctggtgcttcctggctacaagtacctcggacccttcaacggactcgacaagggggagcccgtcaacgcggcggacgcggcggccctcgagcacgacaaggcctacgaccagcagctgcaggcgggtgacaatccgtacctgcggtataaccacgccgacgccgagtttcaggagcgtctgcaagaagatacgtcttttgggggcaacctcgggcgagcagtcttccaggccaagaagcgggttctcgaacctctcggtctggttgaggaaggcgctaagacggctcctggaaagaagagaccggtagagccatcaccccagcgttctccagactcctctacgggcatcggcaagaagggccaacagcccgccagaaaaagactcaattttggtcagactggcgactcagagtcagttccagaccctcaacctctcggagaacctccagcagcgccctctggtgtgggacctaatacaatggctgcaggcggtggcgcaccaatggcagacaataacgaaggcgccgacggagtgggtagttcctcgggaaattggcattgcgattccacatggctgggcgacagagtcatcaccaccagcacccgaacctgggccctgcccacctacaacaaccacctctacaagcaaatctccaacgggacatcgggaggagccaccaacgacaacacctacttcggctacagcaccccctgggggtattttgactttaacagattccactgccacttttcaccacgtgactggcagcgactcatcaacaacaactggggattccggcccaagagactcagcttcaagctcttcaacatccaggtcaaggaggtcacgcagaatgaaggcaccaagaccatcgccaataacctcaccagcaccatccaggtgtttacggactcggagtaccagctgccgtacgttctcggctctgcccaccagggctgcctgcctccgttcccggcggacgtgttcacgattccccagtacggctacctaacactcaacaacggtagtcaggccgtgggacgctcctccttctactgcctggaatactttccttcgcagatgctgagaaccggcaacaacttccagtttacttacaccttcgaggacgtgcctttccacagcagctacgcccacagccagagcttggaccggctgatgaatcctctgattgaccagtacctgtactacttgtctcggattcaaacaacaggaggcacggcaaatacgcagactctgggcttcagccaaggtgggcctaatacaatggccaatcaggcaaagaactggctgccaggaccctgttaccgccaacaacgcgtctcaacgacaaccgggcaaaacaacaatagcaactttgcctggactgctgggaccaaataccatctgaatggaagaaattcattggctaatcctggcatcgctatggcaacacacaaagacgacgaggagcgtttttttcccagtaacgggatcctgatttttggcaaacaaaatgctgccagagacaatgcggattacagcgatgtcatgcccaccagcgaggaagaaatcaaaaccactaaccctgtggccacagaggaatacggtatcgtggcagataacttgcagcagcaaaacacggctcctcaaattggaactgtcaacagccagggggccttacccggtatggtctggcagaaccgggacgtgtacctgcagggtcccatctgggccaagattcctcacacggacggcaacttccacccgtctccgctgatgggcggctttggcctgaaacatcctccgcctcagatcctgatcaagaacacgcctgtacctgcggatcctccgaccaccttcaaccagtcaaagctgaactctttcatcgcgcaatacagcaccggacaggtcagcgtggaaattgaatgggagctgcagaaggaaaacagcaagcgctggaaccccgagatccagtacacctccaactactacaaatctacaagtgtggactttgctgttaatacagaaggcgtgtactctgaaccccgccccattggcacccgttacctcacccgtaatctgtaa

SEQ ID NO: 3927 - DNA, 2217 bp, Artificial Sequence
  source: /note="Description of Artificial Sequence: Synthetic polynucleotide"
atggctgccgatggttatcttccagattggctcgaggacaacctctctgagggcattcgcgagtggtgggcgctgaaacctggagccccgaagcccaaagccaaccagcaaaagcaggacgacggccggggtctggtgcttcctggctacaagtacctcggacccttcaacggactcgacaagggggagcccgtcaacgcggcggacgcggcggccctcgagcacgacaaggcctacgaccagcagctgcaggcgggtgacaatccgtacctgcggtataaccacgccgacgccgagtttcaggagcgtctgcaagaagatacgtcttttgggggcaacctcgggcgagcagtcttccaggccaagaagcgggttctcgaacctctcggtctggttgaggaaggcgctaagacggctcctggaaagaagagaccggtagagccatcaccccagcgttctccagactcctctacgggcatcggcaagaagggccaacagcccgccagaaaaagactcaattttggtcagactggcgactcagagtcagttccagaccctcaacctctcggagaacctccagcagcgccctctggtgtgggacctaatacaatggctgcaggcggtggcgcaccaatggcagacaataacgaaggcgccgacggagtgggtagttcctcgggaaattggcattgcgattccacatggctgggcgacagagtcatcaccaccagcacccgaacctgggccctgcccacctacaacaaccacctctacaagcaaatctccaacgggacatcgggaggagccaccaacgacaacacctacttcggctacagcaccccctgggggtattttgactttaacagattccactgccacttttcaccacgtgactggcagcgactcatcaacaacaactggggattccggcccaagagactcagcttcaagctcttcaacatccaggtcaaggaggtcacgcagaatgaaggcaccaagaccatcgccaataacctcaccagcaccatccaggtgtttacggactcggagtaccagctgccgtacgttctcggctctgcccaccagggctgcctgcctccgttcccggcggacgtgttcacgattccccagtacggctacctaacactcaacaacggtagtcaggccgtgggacgctcctccttctactgcctggaatactttccttcgcagatgctgagaaccggcaacaacttccagtttacttacaccttcgaggacgtgcctttccacagcagctacgcccacagccagagcttggaccggctgatgaatcctctgattgaccagtacctgtactacttgtctcggattcaaacaacaggaggcacggcaaatacgcagactctgggcttcagccaaggtgggcctaatacaatggccaatcaggcaaagaactggctgccaggaccctgttaccgccaacaacgcgtctcaacgacaaccgggcaaaacaacaatagcaactttgcctggactgctgggaccaaataccatctgaatggaagaaattcattggctaatcctggcatcgctatggcaacacacaaagacggcgaggagcgtttttttcccagtaacgggatcctgatttttggcaaacaaaatgctgccagagacaatgcggattacagcgatgtcatgcccaccagcgaggaagaaatcaaaaccactaaccctgtggccacagaggaatacggtatcgtggcagataacttgcagcagcaaaacacggctcctcaaattggaactgtcaacagccagggggccttacccggtatggtctggcagaaccgggacgtgtacctgcagggtcccatctgggccaagattcctcacacggacggcaacttccacccgtctccgctgatgggcggctttggcctgaaacatcctccgcctcagatcctgatcaagaacacgcctgtacctgcggatcctccgaccaccttcaaccagtcaaagctgaactctttcatcacgcaatacagcaccggacaggtcagcgtggaaattgaatgggagctgcagaaggaaaacagcaagcgctggaaccccgagatccagtacacctccaactactacaaatctacaagtgtggactttgctgttaatacagaaggcgtgtactctgaaccccgccccattggcacccgttacctcacccgtaatctgtaa

SEQ ID NO: 3928 - DNA, 2217 bp, Artificial Sequence
  source: /note="Description of Artificial Sequence: Synthetic polynucleotide"
atggctgccgatggttatcttccagattggctcgaggacaacctctctgagggcattcgcgagtggtgggcgctgaaacctggagccccgaagcccaaagccaaccagcaaaagcaggacgacggccggggtctggtgcttcctggctacaagtacctcggacccttcaacggactcgacaagggggagcccgtcaacgcggcggacgcggcggccctcgagcacgacaaggcctacgaccagcagctgcaggcgggtgacaatccgtacctgcggtataaccacgccgacgccgagtttcaggagcgtctgcaagaagatacgtcttttgggggcaacctcgggcgagcagtcttccaggccaagaagcgggttctcgaacctctcggtctggttgaggaaggcgctaagacggctcctggaaagaagagaccggtagagccatcaccccagcgttctccagactcctctacgggcatcggcaagaagggccaacagcccgccagaaaaagactcaattttggtcagactggcgactcagagtcagttccagaccctcaacctctcggagaacctccagcagcgccctctggtgtgggacctaatacaatggctgcaggcggtggcgcaccaatggcagacaataacgaaggcgccgacggagtgggtagttcctcgggaaattggcattgcgattccacatggctgggcgacagagtcatcaccaccagcacccgaacctgggccctgcccacctacaacaaccacctctacaagcaaatctccaacgggacatcgggaggagccaccaacgacaacacctacttcggctacagcaccccctgggggtattttgactttaacagattccactgccacttttcaccacgtgactggcagcgactcatcaacaacaactggggattccggcccaagagactcagcttcaagctcttcaacatccaggtcaaggaggtcacgcagaatgaaggcaccaagaccatcgccaataacctcaccagcaccatccaggtgtttacggactcggagtaccagctgccgtacgttctcggctctgcccaccagggctgcctgcctccgttcccggcggacgtgttcacgattccccagtacggctacctaacactcaacaacggtagtcaggccgtgggacgctcctccttctactgcctggaatactttccttcgcagatgctgagaaccggcaacaacttccagtttacttacaccttcgaggacgtgcctttccacagcagctacgcccacagccagagcttggaccggctgatgaatcctctgattgaccagtacctgtactacttgtctcggattcaaacaacaggaggcacggcaaatacgcagactctgggcttcagccaaggtgggcctaatacaatggccaatcaggcaaagaactggctgccaggaccctgttaccgccaacaacgcgtctcaacgacaaccgggcaaaacaacaatagcaactttgcctggactgctgggaccaaataccatctgaatggaagaaattcattggctaatcctggcatcgctatggcaacacacaaaggcgacgaggagcgtttttttcccagtaacgggatcctgatttttggcaaacaaaatgctgccagagacaatgcggattacagcgatgtcatgcccaccagcgaggaagaaatcaaaaccactaaccctgtggccacagaggaatacggtatcgtggcagataacttgcagcagcaaaacacggctcctcaaattggaactgtcaacagccagggggccttacccggtatggtctggcagaaccgggacgtgtacctgcagggtcccatctgggccaagattcctcacacggacggcaacttccacccgtctccgctgatgggcggctttggcctgaaacatcctccgcctcagatcctgatcaagaacacgcctgtacctgcggatcctccgaccaccttcaaccagtcaaagctgaactctttcatcacgcaatacagcaccggacaggtcagcgtggaaattgaatgggagctgcagaaggaaaacagcaagcgctggaaccccgagatccagtacacctccaactactacaaatctacaagtgtggactttgctgttaatacagaaggcgtgtactctgaaccccgccccattggcacccgttacctcacccgtaatctgtaa

SEQ ID NO: 3929 - DNA, 2217 bp, Artificial Sequence
  source: /note="Description of Artificial Sequence: Synthetic polynucleotide"
atggctgccgatggttatcttccagattggctcgaggacaacctctctgagggcattcgcgagtggtgggcgctgaaacctggagccccgaagcccaaagccaaccagcaaaagcaggacgacggccggggtctggtgcttcctggctacaagtacctcggacccttcaacggactcgacaagggggagcccgtcaacgcggcggacgcggcggccctcgagcacgacaaggcctacaaccagcagctgcaggcgggtgacaatccgtacctgcggtataaccacgccgacgccgagtttcaggagcgtctgcaagaagatacgtcttttgggggcaacctcgggcgagcagtcttccaggccaagaagcgggttctcgaacctctcggtctggttgaggaaggcgctaagacggctcctggaaagaagagaccggtagagccatcaccccagcgttctccagactcctctacgggcatcggcaagaagggccaacagcccgccagaaaaagactcaattttggtcagactggcgactcagagtcagttccagaccctcaacctctcggagaacctccagcagcgccctctggtgtgggacctaatacaatggctgcaggcggtggcgcaccaatggcagacaataacgaaggcgccgacggagtgggtagttcctcgggaaattggcattgcgattccacatggctgggcgacagagtcatcaccaccagcacccgaacctgggccctgcccacctacaacaaccacctctacaagcaaatctccaacgggacatcgggaggagccaccaacgacaacacctacttcggctacagcaccccctgggggtattttgactttaacagattccactgccacttttcaccacgtgactggcagcgactcatcaacaacaactggggattccggcccaagagactcagcttcaagctcttcaacatccaggtcaaggaggtcacgcagaatgaaggcaccaagaccatcgccaataacctcaccagcaccatccaggtgtttacggactcggagtaccagctgccgtacgttctcggctctgcccaccagggctgcctgcctccgttcccggcggacgtgttcacgattccccagtacggctacctaacactcaacaacggtagtcaggccgtgggacgctcctccttctactgcctggaatactttccttcgcagatgctgagaaccggcaacaacttccagtttacttacaccttcgaggacgtgcctttccacagcagctacgcccacagccagagcttggaccggctgatgaatcctctgattgaccagtacctgtactacttgtctcggattcaaacaacaggaggcacggcaaatacgcagactctgggcttcagccaaggtgggcctaatacaatggccaatcaggcaaagaactggctgccaggaccctgttaccgccaacaacgcgtctcaacgacaaccgggcaaaacaacaatagcaactttgcctggactgctgggaccaaataccatctgaatggaagaaattcattggctaatcctggcatcgctatggcaacacacaaagacgacgaggagcgtttttttcccagtaacgggatcctgatttttggcaaacaaaatgctgccagagacaatgcggattacagcgatgtcatgcccaccagcgaggaagaaatcaaaaccactaaccctgtggccacagaggaatacggtatcgtggcagataacttgcagcagcaaaacacggctcctcaaattggaactgtcaacagccagggggccttacccggtatggtctggcagaaccgggacgtgtacctgcagggtcccatctgggccaagattcctcacacggacggcaacttccacccgtctccgctgatgggcggctttggcctgaaacatcctccgcctcagatcctgatcaagaacacgcctgtacctgcggatcctccgaccaccttcaaccagtcaaagctgaactctttcatcacgcaatacagcaccggacaggtcagcgtggaaattgaatgggagctgcagaaggaaaacagcaagcgctggaaccccgagatccagtacacctccaactactacaaatctacaagtgtggactttgctgttaatacagaaggcgtgtactctgaaccccgccccattggcacccgttacctcacccgtaatctgtaa

SEQ ID NO: 3930 - DNA, 2217 bp, Artificial Sequence
  source: /note="Description of Artificial Sequence: Synthetic polynucleotide"
atggctgccgatggttatcttccagattggctcgaggacaacctctctgagggcattcgcgagtggtgggcgctgaaacctggagccccgaagcccaaagccaaccagcaaaagcaggacgacggccggggtctggtgcttcctggctacaagtacctcggacccttcaacggactcgacaagggggagcccgtcaacgcggcggacgcggcggccctcgagcacgacaaggcctacgaccagcagctgcaggcgggtgacaatccgtacctgcggtataaccacgccgacgccgagtttcaggagcgtctgcaagaagatacgtcttttgggggcaacctcgggcgagcagtcttccaggccaagaagcgggttctcgaacctctcggtctggttgaggaaggcgctaagacggctcctggaaagaagagaccggtagagccatcaccccagcgttctccagactcctctacgggcatcggcaagaagggccaacagcccgccagaaaaagactcaattttggtcagactggcgactcagagtcagttccagaccctcaacctctcggagaacctccagcagcgccctctggtgtgggacctaatacaatggctgcaggcggtggcgcaccaatggcagacaataacgaaggcgccgacggagtgggtagttcctcgggaaattggcattgcgattccacatggctgggcgacagagtcatcaccaccagcacccgaacctgggccctgcccacctacaacaaccacctctacaagcaaatctccaacgggacatcgggaggagccaccaacgacaacacctacttcggctacagcaccccctgggggtattttgactttaacagattccactgccacttttcaccacgtgactggcagcgactcatcaacaacaactggggattccggcccaagagactcagcttcaagctcttcaacatccaggtcaaggaggtcacgcagaatgaaggcaccaagaccatcgccaataacctcaccagcaccatccaggtgtttacggactcggagtaccagctgccgtacgttctcggctctgcccaccagggctgcctgcctccgttcccggcggacgtgttcacgattccccagtacggctacctaacactcaacaacggtagtcaggccgtgggacgctcctccttctactgcctggaatactttccttcgcagatgctgagaaccggcaacaacttccagtttacttacaccttcgaggacgtgcctttccacagcagctacgcccacagccagagcttggaccggctgatgaatcctctgattgaccagtacctgtactacttgtctcggattcaaacaacaggaggcacggcaaatacgcagactctgggcttcagccaaggtgggcctaatacaatggccaatcaggcaaagaactggctgccaggaccctgttaccgccaacaacgcgtctcaacgacaaccgggcaaaacaacaatagcaactttgcctggactgctgggaccaaataccatctgaatggaagaaattcattggctaatcctggcatcgctatggcaacacacaaagacgacgaggagcgtttttttcccagtaacgggatcctgatttttggcaaacaaaatgctgccagagacaatgcggattacagcgatgtcatgcccaccagcgaggaagaaatcaaaaccactaaccctgtggccacagaggaatacggtatcgtggcagataacttgcagcagcaaaacacggctcctcaaattggaactgtcaacagccagggggccttacccggtatggtctggcagaaccgggacgtgtacctgcagggtcccacctgggccaagattcctcacacggacggcaacttccacccgtctccgctgatgggcggctttggcctgaaacatcctccgcctcagatcctgatcaagaacacgcctgtacctgcggatcctccgaccaccttcaaccagtcaaagctgaactctttcatcacgcaatacagcaccggacaggtcagcgtggaaattgaatgggagctgcagaaggaaaacagcaagcgctggaaccccgagatccagtacacctccaactactacaaatctacaagtgtggactttgctgttaatacagaaggcgtgtactctgaaccccgccccattggcacccgttacctcacccgtaatctgtaa

SEQ ID NO: 3931 - DNA, 2217 bp, Artificial Sequence
  source: /note="Description of Artificial Sequence: Synthetic polynucleotide"
atggctgccgatggttatcttccagattggctcgaggacaacctctctgagggcattcgcgagtggtgggcgctgaaacctggagccccgaagcccaaagccaaccagcaaaagcaggacgacggccggggtctggtgcttcctggctacaagtacctcggacccttcaacggactcgacaagggggagcccgtcaacgcggcggacgcggcggccctcgagcacgacaaggcctacgaccagcagctgcaggcgggtgacaatccgtacctgcggtataaccacgccgacgccgagtttcaggagcgtctgcaagaagatacgtcttttgggggcaacctcgggcgagcagtcttccaggccaagaagcgggttctcgaacctctcggtctggttgaggaaggcgctaagacggctcctggaaagaagagaccggtagagccatcaccccagcgttctccagactcctctacgggcatcggcaagaagggccaacagcccgccagaaaaagactcaattttggtcagactggcgactcagagtcagttccagaccctcaacctctcggagaacctccagcagcgccctctggtgtgggacctaatacaatggctgcaggcggtggcgcaccaatggcagacaataacgaaggcgccgacggagtgggtagttcctcgggaaattggcattgcgattccacatggctgggcgacagagtcatcaccaccagcacccgaacctgggccctgcccacctacaacaaccacctctacaagcaaatctccaacgggacatcgggaggagccaccaacgacaacacctacttcggctacagcaccccctgggggtattttgactttaacagattccactgccacttttcaccacgtgactggcagcgactcatcaacaacaactggggattccggcccaagagactcagcttcaagctcttcaacatccaggtcaaggaggtcacgcagaatgaaggcaccaagaccatcgccaataacctcaccagcaccatccaggtgtttacggactcggagtaccagctgccgtacgttctcggctctgcccaccagggctgcctgcctccgttcccggcggacgtgttcacgattccccagtacggctacctaacactcaacaacggtagtcaggccgtgggacgctcctccttctactgcctggaatactttccttcgcagatgctgagaaccggcaacaacttccagtttacttacaccttcgaggacgtgcctttccacagcagctacgcccacagccagagcttggaccggctgatgaatcctctgattgaccagtacctgtactacttgtctcggattcaaacaacaggaggcacggcaaatacgcagactctgggcttcagccaaggtgggcctaatacaatggccaatcaggcaaagaactggctgccaggaccctgttaccgccaacaacgcgtctcaacgacaaccgggcaaaacaacaatagcaactttgcctggactgctgggaccaaataccatctgaatggaagaaattcattggctaatcctggcatcgctatggcaacacacaaagacgacgaggagcgtttttttcccagtaacgggatcctgatttttggcaaacaaaatgctgccagagacaatgcggattacagcgatgtcatgcccaccagcgaggaagaaatcaaaaccactaaccctgtggccacagaggaatacggtatcgtggcagataacttgcggcagcaaaacacggctcctcaaattggaactgtcaacagccagggggccttacccggtatggtctggcagaaccgggacgtgtacctgcagggtcccatctgggccaagattcctcacacggacggcaacttccacccgtctccgctgatgggcggctttggcctgaaacatcctccgcctcagatcctgatcaagaacacgcctgtacctgcggatcctccgaccaccttcaaccagtcaaagctgaactctttcatcacgcaatacagcaccggacaggtcagcgtggaaattgaatgggagctgcagaaggaaaacagcaagcgctggaaccccgagatccagtacacctccaactactacaaatctacaagtgtggactttgctgttaatacagaaggcgtgtactctgaaccccgccccattggcacccgttacctcacccgtaatctgtaa

SEQ ID NO: 3932 - DNA, 2217 bp, Artificial Sequence
  source: /note="Description of Artificial Sequence: Synthetic polynucleotide"
atggctgccgatggttatcttccagattggctcgaggacaacctctctgagggcattcgcgagtggtgggcgctgaaacctggagccccgaagcccaaagccaaccagcaaaagcaggacgacggccggggtctggtgcttcctggctacaagtacctcggacccttcaacggactcgacaagggggagcccgtcaacgcggcggacgcggcggccctcgagcacgacaaggcctacgaccagcagctgcaggcgggtgacaatccgtacctgcggtataaccacgccgacgccgagtttcaggagcgtctgcaagaagatacgtcttttgggggcaacctcgggcgagcagtcttccaggccaagaagcgggttctcgaacctctcggtctggttgaggaaggcgctaagacggctcctggaaagaagagaccggtagagccatcaccccagcgttctccagactcctctacgggcatcggcaagaagggccaacagcccgccagaaaaagactcaattttggtcagactggcgactcagagtcagttccagaccctcaacctctcggagaacctccagcagcgccctctggtgtgggacctaatacaatggctgcaggcggtggcgcaccaatggcagacaataacgaaggcgccgacggagtgggtagttcctcgggaaattggcattgcgattccacatggctgggcgacagagtcatcaccaccagcacccgaacctgggccctgcccacctacaacaaccacctctacaagcaaatctccaacgggacatcgggaggagccaccaacgacaacacctacttcggctacagcaccccctgggggtattttgactttaacagattccactgccacttttcaccacgtgactggcagcgactcatcaacaacaactggggattccggcccaagagactcagcttcaagctcttcaacatccaggtcaaggaggtcacgcagaatgaaggcaccaagaccatcgccaataacctcaccagcaccatccaggtgtttacggactcggagtaccagctgccgtacgttctcggctctgcccaccagggctgcctgcctccgttcccggcggacgtgttcacgattccccagtacggctacctaacactcaacaacggtagtcaggccgtgggacgctcctccttctactgcctggaatactttccttcgcagatgctgagaaccggcaacaacttccagtttacttacaccttcgaggacgtgcctttccacagcagctacgcccacagccagagcttggaccggctgatgaatcctctgattgaccagtacctgtactacttgtctcggattcaaacaacaggaggcacggcaaatacgcagactctgggcttcagccaaggtgggcctaatacaatggccaatcaggcaaagaactggctgccaggaccctgttaccgccaacaacgcgtctcaacgacaaccgggcaaaacaacaatagcaactttgcctggactgctgggaccaaataccatctgaatggaagaaattcattggctaatcctggcatcgctatggcaacacacaaagacgacgaggagcgtttttttcccagtaacgggatcctgatttttggcaaacaaaatgctgccagagacaatgcggattacagcgatgccatgcccaccagcgaggaagaaatcaaaaccactaaccctgtggccacagaggaatacggtatcgtggcagataacttgcagcagcaaaacacggctcctcaaattggaactgtcaacagccagggggccttacccggtatggtctggcagaaccgggacgtgtacctgcagggtcccatctgggccaagattcctcacacggacggcaacttccacccgtctccgctgatgggcggctttggcctgaaacatcctccgcctcagatcctgatcaagaacacgcctgtacctgcggatcctccgaccaccttcaaccagtcaaagctgaactctttcatcacgcaatacagcaccggacaggtcagcgtggaaattgaatgggagctgcagaaggaaaacagcaagcgctggaaccccgagatccagtacacctccaactactacaaatctacaagtgtggactttgctgttaatacagaaggcgtgtactctgaaccccgccccattggcacccgttacctcacccgtaatctgtaa

SEQ ID NO: 3933 - DNA, 2217 bp, Artificial Sequence
  source: /note="Description of Artificial Sequence: Synthetic polynucleotide"
atggctgccgatggttatcttccagattggctcgaggacaacctctctgagggcattcgcgagtggtgggcgctgaaacctggagccccgaagcccaaagccaaccagcaaaagcaggacgacggccggggtctggtgcttcctggctacaagtacctcggacccttcaacggactcgacaagggggagcccgtcaacgcggcggacgcggcggccctcgagcacgacaaggcctacgaccagcagctgcaggcgggtgacaatccgtacctgcggtataaccacgccgacgccgagtttcaggagcgtctgcaagaagatacgtcttttgggggcaacctcgggcgagcagtcttccaggccaagaagcgggttctcgaacctctcggtctggttgaggaaggcgctaagacggctcctggaaagaagagaccggtagagccatcaccccagcgttctccagactcctctacgggcatcggcaagaagggccaacagcccgccagaaaaagactcaattttggtcagactggcgactcagagtcagttccagaccctcaacctctcggagaacctccagcagcgccctctggtgtgggacctaatacaatggctgcaggcggtggcgcaccaatggcagacaataacgaaggcgccgacggagtgggtagttcctcgggaaattggcattgcgattccacatggctgggcgacagagtcatcaccaccagcacccgaacctgggccctgcccacctacaacaaccacctctacaagcaaatctccaacgggacatcgggaggagccaccaacggcaacacctacttcggctacagcaccccctgggggtattttgactttaacagattccactgccacttttcaccacgtgactggcagcgactcatcaacaacaactggggattccggcccaagagactcagcttcaagctcttcaacatccaggtcaaggaggtcacgcagaatgaaggcaccaagaccatcgccaataacctcaccagcaccatccaggtgtttacggactcggagtaccagctgccgtacgttctcggctctgcccaccagggctgcctgcctccgttcccggcggacgtgttcacgattccccagtacggctacctaacactcaacaacggtagtcaggccgtgggacgctcctccttctactgcctggaatactttccttcgcagatgctgagaaccggcaacaacttccagtttacttacaccttcgaggacgtgcctttccacagcagctacgcccacagccagagcttggaccggctgatgaatcctctgattgaccagtacctgtactacttgtctcggattcaaacaacaggaggcacggcaaatacgcagactctgggcttcagccaaggtgggcctaatacaatggccaatcaggcaaagaactggctgccaggaccctgttaccgccaacaacgcgtctcaacgacaaccgggcaaaacaacaatagcaactttgcctggactgctgggaccaaataccatctgaatggaagaaattcattggctaatcctggcatcgctatggcaacacacaaagacgacgaggagcgtttttttcccagtaacgggatcctgatttttggcaaacaaaatgctgccagagacaatgcggattacagcgatgtcatgcccaccagcgaggaagaaatcaaaaccactaaccctgtggccacagaggaatacggtatcgtggcagataacttgcagcagcaaaacacggctcctcaaattggaactgtcaacagccagggggccttacccggtatggtctggcagaaccgggacgtgtacctgcagggtcccatctgggccaagattcctcacacggacggcaacttccacccgtctccgctgatgggcggctttggcctgaaacatcctccgcctcagatcctgatcaagaacacgcctgtacctgcggatcctccgaccaccttcaaccagtcaaagctgaactctttcatcacgcaatacagcaccggacaggtcagcgtggaaattgaatgggagctgcagaaggaaaacagcaagcgctggaaccccgagatccagtacacctccaactactacaaatctacaagtgtggactttgctgttaatacagaaggcgtgtactctgaaccccgccccattggcacccgttacctcacccgtaatctgtaa

SEQ ID NO: 3934 - DNA, 2217 bp, Artificial Sequence
  source: /note="Description of Artificial Sequence: Synthetic polynucleotide"
atggctgccgatggttatcttccagattggctcgaggacaacctctctgagggcattcgcgagtggtgggcgctgaaacctggagccccgaagcccaaagccaaccagcaaaagcaggacgacggccggggtctggtgcttcctggctacaagtacctcggacccttcaacggactcgacaagggggagcccgtcaacgcggcggacgcggcggccctcgagcacgacaaggcctacgaccagcagctgcaggcgggtgacaatccgtacctgcggtataaccacgccgacgccgagtttcaggagcgtctgcaagaagatacgtcttttgggggcaacctcgggcgagcagtcttccaggccaagaagcgggttctcgaacctctcggtctggttgaggaaggcgctaagacggctcctggaaagaagagaccggtagagccatcaccccagcgttctccagactcctctacgggcatcggcaagaagggccaacagcccgccagaaaaagactcaattttggtcagactggcgactcagagtcagttccagaccctcaacctctcggagaacctccagcagcgccctctggtgtgggacctaatacaatggctgcaggcggtggcgcaccaatggcagacaataacgaaggcgccgacggagtgggtagttcctcgggaaattggcattgcgattccacatggctgggcgacagagtcatcaccaccagcacccgaacctgggccctgcccacctacaacaaccacctctacaagcaaatctccaacgggacatcgggaggagccaccaacgacaacacctacttcggctacagcaccccctgggggtattttgactttaacagattccactgccacttttcaccacgtgactggcagcgactcatcaacaacaactggggattccggcccaagagactcagcttcaagctcttcaacatccaggtcaaggaggtcgcgcagaatgaaggcaccaagaccatcgccaataacctcaccagcaccatccaggtgtttacggactcggagtaccagctgccgtacgttctcggctctgcccaccagggctgcctgcctccgttcccggcggacgtgttcacgattccccagtacggctacctaacactcaacaacggtagtcaggccgtgggacgctcctccttctactgcctggaatactttccttcgcagatgctgagaaccggcaacaacttccagtttacttacaccttcgaggacgtgcctttccacagcagctacgcccacagccagagcttggaccggctgatgaatcctctgattgaccagtacctgtactacttgtctcggattcaaacaacaggaggcacggcaaatacgcagactctgggcttcagccaaggtgggcctaatacaatggccaatcaggcaaagaactggctgccaggaccctgttaccgccaacaacgcgtctcaacgacaaccgggcaaaacaacaatagcaactttgcctggactgctgggaccaaataccatctgaatggaagaaattcattggctaatcctggcatcgctatggcaacacacaaagacgacgaggagcgtttttttcccagtaacgggatcctgatttttggcaaacaaaatgctgccagagacaatgcggattacagcgatgtcatgcccaccagcgaggaagaaatcaaaaccactaaccctgtggccacagaggaatacggtatcgtggcagataacttgcagcagcaaaacacggctcctcaaattggaactgtcaacagccagggggccttacccggtatggtctggcagaaccgggacgtgtacctgcagggtcccatctgggccaagattcctcacacggacggcaacttccacccgtctccgctgatgggcggctttggcctgaaacatcctccgcctcagatcctgatcaagaacacgcctgtacctgcggatcctccgaccaccttcaaccagtcaaagctgaactctttcatcacgcaatacagcaccggacaggtcagcgtggaaattgaatgggagctgcagaaggaaaacagcaagcgctggaaccccgagatccagtacacctccaactactacaaatctacaagtgtggactttgctgttaatacagaaggcgtgtactctgaaccccgccccattggcacccgttacctcacccgtaatctgtaa

SEQ ID NO: 3935 - DNA, 2217 bp, Artificial Sequence
  source: /note="Description of Artificial Sequence: Synthetic polynucleotide"
atggctgccgatggttatcttccagattggctcgaggacaacctctctgagggcattcgcgagtggtgggcgctgaaacctggagccccgaagcccaaagccaaccagcaaaagcaggacgacggccggggtctggtgcttcctggctacaagtacctcggacccttcaacggactcgacaagggggagcccgtcaacgcggcggacgcggcggccctcgagcacgacaaggcctacgaccagcagctgcaggcgggtgacaatccgtacctgcggtataaccacgccgacgccgagtttcaggagcgtctgcaagaagatacgtcttttgggggcaacctcgggcgagcagtcttccaggccaagaagcgggttctcgaacctctcggtctggttgaggaaggcgctaagacggctcctggaaagaagagaccggtagagccatcaccccagcgttctccagactcctctacgggcatcggcaagaagggccaacagcccgccagaaaaagactcaattttggtcagactggcgactcagagtcagttccagaccctcaacctctcggagaacctccagcagcgccctctggtgtgggacctaatacaatggctgcaggcggtggcgcaccaatggcagacaataacgaaggcgccgacggagtgggtagttcctcgggaaattggcattgcgattccacatggctgggcgacagagtcatcaccaccagcacccgaacctgggccctgcccacctacaacaaccacctctacaagcaaatctccaacgggacatcgggaggagccaccaacgacaacacctacttcggctacagcaccccctgggggtattttgactttaacagattccactgccacttttcaccacgtgactggcagcgactcatcaacaacaactggggattccggcccaagagactcagcttcaagctcttcaacatccaggtcaaggaggtcacgcagaatgaaggcaccaagaccatcgccaataacctcaccagcaccatccaggtgtttacggactcggagtaccagctgccgtacgttctcggctctgcccaccagggctgcctgcctccgttcccggcggacgtgttcacgattccccagtacggctacctaacactcaacaacggtagtcaggccgtgggacgctcctccttctactgcctggaatactttccttcgcagatgctgagaaccggcaacaacttccagtttacttacaccttcgaggacgtgcctttccacagcagctacgcccacagccagagcttggaccggctgatgaatcctctgattgaccagtacctgtactacttgtctcggattcaaacaacaggaggcacggcaaatacgcagactctgggcttcagccaaggtgggcctaatacaatggccaatcaggcaaagaactggctgccaggaccctgttaccgccaacaacgcgtctcaacgacaaccgggcaaaacaacaatagcaactttgcctggactgctgggaccaaataccatctgaatggaagaaattcattggctaatcctggcatcgctatggcaacacacaaagacgacgaggagcgtttttttcccagtaacgggatcctgatttttggcaaacaaaatgctgccagagacaatgcggattacagcgatgtcatgcccaccagcgaggaagaaatcaaaaccactaaccctgtggccacagaggaatacggtatcgtggcagataacttgcagcagcaaaacacggctcctcaaattggaactgtcaacagccagggggccttacccggtatggtctggcagaaccgggacgtgtacctgcagggtcccatctgggccaagattcctcacacggacggcaacttccacccgtctccgctgatgggcggctttggcctgaaacatcctccgcctcagatcctgatcaagaacacgcctgtacctgcggatcctccgaccaccttcaaccagtcaaagctgaactctttcatcacgcaatacagcaccggacaggtcagcgcggaaattgaatgggagctgcagaaggaaaacagcaagcgctggaaccccgagatccagtacacctccaactactacaaatctacaagtgtggactttgctgttaatacagaaggcgtgtactctgaaccccgccccattggcacccgttacctcacccgtaatctgtaa

SEQ ID NO: 3936 - DNA, 2217 bp, Artificial Sequence
  source: /note="Description of Artificial Sequence: Synthetic polynucleotide"
atggctgccgatggttatcttccagattggctcgaggacaacctctctgagggcattcgcgagtggtgggcgctgaaacctggagccccgaagcccaaagccaaccagcaaaagcaggacgacggccggggtctggtgcttcctggctacaagtacctcggacccttcaacggactcgacaagggggagcccgtcaacgcggcggacgcggcggccctcgagcacgacaaggcctacgaccagcagctgcaggcgggtgacaatccgtacctgcggtataaccacgccgacgccgagtttcaggagcgtctgcaagaagatacgtcttttgggggcaacctcgggcgagcagtcttccaggccaagaagcgggttctcgaacctctcggtctggttgaggaaggcgctaagacggctcctggaaagaagagaccggtagagccatcaccccagcgttctccagactcctctacgggcatcggcaagaagggccaacagcccgccagaaaaagactcaattttggtcagactggcgactcagagtcagttccagaccctcaacctctcggagaacctccagcagcgccctctggtgtgggacctaatacaatggctgcaggcggtggcgcaccaatggcagacaataacgaaggcgccgacggagtgggtagttcctcgggaaattggcattgcgattccacatggctgggcgacagagtcatcaccaccagcacccgaacctgggccctgcccacctacaacaaccacctctacaagcaaatctccaacgggacatcgggaggagccaccaacgacaacacctacttcggctacagcaccccctgggggtattttgactttaacagattccactgccacttttcaccacgtgactggcagcgactcatcaacaacaactggggattccggcccaagagactcagcttcaagctcttcaacatccaggtcaaggaggtcacgcagaatgaaggcaccaagaccatcgccaataacctcaccagcaccatccaggtgtttacggactcggagtaccagctgccgtacgttctcggctctgcccaccagggctgcctgcctccgttcccggcggacgtgttcacgattccccagtacggctacctaacactcaacaacggtagtcaggccgtgggacgctcctccttctactgcctggaatactttccttcgcagatgctgagaaccggcaacaacttccagtttacttacaccttcgaggacgtgcctttccacagcagctacgcccacagccagggcttggaccggctgatgaatcctctgattgaccagtacctgtactacttgtctcggattcaaacaacaggaggcacggcaaatacgcagactctgggcttcagccaaggtgggcctaatacaatggccaatcaggcaaagaactggctgccaggaccctgttaccgccaacaacgcgtctcaacgacaaccgggcaaaacaacaatagcaactttgcctggactgctgggaccaaataccatctgaatggaagaaattcattggctaatcctggcatcgctatggcaacacacaaagacgacgaggagcgtttttttcccagtaacgggatcctgatttttggcaaacaaaatgctgccagagacaatgcggattacagcgatgtcatgcccaccagcgaggaagaaatcaaaaccactaaccctgtggccacagaggaatacggtatcgtggcagataacttgcagcagcaaaacacggctcctcaaattggaactgtcaacagccagggggccttacccggtatggtctggcagaaccgggacgtgtacctgcagggtcccatctgggccaagattcctcacacggacggcaacttccacccgtctccgctgatgggcggctttggcctgaaacatcctccgcctcagatcctgatcaagaacacgcctgtacctgcggatcctccgaccaccttcaaccagtcaaagctgaactctttcatcacgcaatacagcaccggacaggtcagcgtggaaattgaatgggagctgcagaaggaaaacagcaagcgctggaaccccgagatccagtacacctccaactactacaaatctacaagtgtggactttgctgttaatacagaaggcgtgtactctgaaccccgccccattggcacccgttacctcacccgtaatctgtaa

SEQ ID NO: 3937 - DNA, 2217 bp, Artificial Sequence
  source: /note="Description of Artificial Sequence: Synthetic polynucleotide"
atggctgccgatggttatcttccagattggctcgaggacaacctctctgagggcattcgcgagtggtgggcgctgaaacctggagccccgaagcccaaagccaaccagcaaaagcaggacgacggccggggtctggtgcttcctggctacaagtacctcggacccttcaacggactcgacaagggggagcccgtcaacgcggcggacgcggcggccctcgagcacgacaaggcctacgaccagcagctgcaggcgggtgacaatccgtacctgcggtataaccacgccgacgccgagtttcaggagcgtctgcaagaagatacgtcttttgggggcaacctcgggcgagcagtcttccaggccaagaagcgggttctcgaacctctcggtctggttgaggaaggcgctaagacggctcctggaaagaagagaccggtagagccatcaccccagcgttctccagactcctctacgggcatcggcaagaagggccaacagcccgccagaaaaagactcaattttggtcagactggcgactcagagtcagttccagaccctcaacctctcggagaacctccagcagcgccctctggtgtgggacctaatacaatggctgcaggcggtggcgcaccaatggcagacaataacgaaggcgccgacggagtgggtagttcctcgggaaattggcattgcgattccacatggctgggcgacagagtcatcaccaccagcacccgaacctgggccctgcccacctacaacaaccacctctacaagcaaatctccaacgggacatcgggaggagccaccaacgacaacacctacttcggctacagcaccccctgggggtattttgactttaacagattccactgccacttttcaccacgtgactggcagcgactcatcaacaacaactggggattccggcccaagagactcagcttcaagctcttcaacatccaggtcaaggaggtcacgcagaatgaaggcaccaagaccatcgccaataacctcaccagcaccatccaggtgtttacggactcggagtaccagctgccgtacgttctcggctctgcccaccagggctgcctgcctccgttcccggcggacgtgttcacgattccccagtacggctacctaacactcaacaacggtagtcaggccgtgggacgctcctccttctactgcctggaatactttccttcgcagatgctgagaaccggcagcaacttccagtttacttacaccttcgaggacgtgcctttccacagcagctacgcccacagccagagcttggaccggctgatgaatcctctgattgaccagtacctgtactacttgtctcggattcaaacaacaggaggcacggcaaatacgcagactctgggcttcagccaaggtgggcctaatacaatggccaatcaggcaaagaactggctgccaggaccctgttaccgccaacaacgcgtctcaacgacaaccgggcaaaacaacaatagcaactttgcctggactgctgggaccaaataccatctgaatggaagaaattcattggctaatcctggcatcgctatggcaacacacaaagacgacgaggagcgtttttttcccagtaacgggatcctgatttttggcaaacaaaatgctgccagagacaatgcggattacagcgatgtcatgcccaccagcgaggaagaaatcaaaaccactaaccctgtggccacagaggaatacggtatcgtggcagataacttgcagcagcaaaacacggctcctcaaattggaactgtcaacagccagggggccttacccggtatggtctggcagaaccgggacgtgtacctgcagggtcccatctgggccaagattcctcacacggacggcaacttccacccgtctccgctgatgggcggctttggcctgaaacatcctccgcctcagatcctgatcaagaacacgcctgtacctgcggatcctccgaccaccttcaaccagtcaaagctgaactctttcatcacgcaatacagcaccggacaggtcagcgtggaaattgaatgggagctgcagaaggaaaacagcaagcgctggaaccccgagatccagtacacctccaactactacaaatctacaagtgtggactttgctgttaatacagaaggcgtgtactctgaaccccgccccattggcacccgttacctcacccgtaatctgtaa

SEQ ID NO: 3938 - DNA, 2217 bp, Artificial Sequence
  source: /note="Description of Artificial Sequence: Synthetic polynucleotide"
atggctgccgatggttatcttccagattggctcgaggacaacctctctgagggcattcgcgagtggtgggcgctgaaacctggagccccgaagcccaaagccaaccagcaaaagcaggacgacggccggggtctggtgcttcctggctacaagtacctcggacccttcaacggactcgacaagggggagcccgtcaacgcggcggacgcggcggccctcgagcacgacaaggcctacgaccagcagctgcaggcgggtgacaatccgtacctgcggtataaccacgccgacgccgagtttcaggagcgtctgcaagaagatacgtcttttgggggcaacctcgggcgagcagtcttccaggccaagaagcgggttctcgaacctctcggtctggttgaggaaggcgctaagacggctcctggaaagaagagaccggtagagccatcaccccagcgttctccagactcctctacgggcatcggcaagaagggccaacagcccgccagaaaaagactcaattttggtcagactggcgactcagagtcagttccagaccctcaacctctcggagaacctccagcagcgccctctggtgtgggacctaatacaatggctgcaggcggtggcgcaccaatggcagacaataacgaaggcgccgacggagtgggtagttcctcgggaaattggcattgcgattccacatggctgggcgacagagtcatcaccaccagcacccgaacctgggccctgcccacctacaacaaccacctctacaagcaaatctccaacgggacatcgggaggagccaccaacgacaacacctacttcggctacagcaccccctgggggtattttgactttaacagattccactgccacttttcaccacgtgactggcagcgactcatcaacaacaactggggattccggcccaagagactcagcttcaagctcttcaacatccaggtcaaggaggtcacgcagaatgaaggcaccaagaccatcgccaataacctcaccagcaccatccaggtgtttacggactcggagtaccagctgccgtacgttctcggctctgcccaccagggctgcctgcctccgttcccggcggacgtgttcacgattccccagtacggctacctaacactcaacaacggtagtcaggccgtgggacgctcctccttctactgcctggaatactttccttcgcagatgctgagaaccggcaacaacttccagtttacttacaccttcgaggacgtgcctttccacagcagctacgcccacagccagagcttggaccggctgatgaatcctctgattgaccagtacctgtactacttgtctcggattcaaacaacaggaggcacggcaaatacgcagactctgggcttcagccaaggtgggcctaatacaatggccaatcaggcaaagaactggctgccaggaccctgttaccgccaacaacgcgtctcaacgacaaccgggcaaaacaacaatagcaactttgcctggactgctgggaccaaataccatctgaatggaagaaattcattggctaatcctggcatcgctatggcaacacacaaagacgacgaggagcgtttttttcccagtaacgggatcctgatttttggcaaacaaaatgctgccagagacaatgcggattacagcgatgtcatgcccaccagcgaggaagaaatcaaaaccactaaccctgtggccacagaggaatacggtatcgtggcagataacttgcagcagcaaaacacggctcctcaaattggaactgtcaacagccagggggccttacccggtatggtctggcagaaccgggacgtgtacctgcagggtcccatctgggccaagattcctcacacggacggcaacttccacccgtctccgctgatgggcggctttggcctgaaacatcctccgcctcagatcctgatcaagaacacgcctgtacctgcggatcctccgaccaccttcaaccagtcaaagctgaactctttcatcacgcaatacagcaccggacaggtcagcgtggaaattgaatgggagctgcggaaggaaaacagcaagcgctggaaccccgagatccagtacacctccaactactacaaatctacaagtgtggactttgctgttaatacagaaggcgtgtactctgaaccccgccccattggcacccgttacctcacccgtaatctgtaa

SEQ ID NO: 3939 - DNA, 2217 bp, Artificial Sequence
  source: /note="Description of Artificial Sequence: Synthetic polynucleotide"
atggctgccgatggttatcttccagattggctcgaggacaacctctctgagggcattcgcgagtggtgggcgctgaaacctggagccccgaagcccaaagccaaccagcaaaagcaggacgacggccggggtctggtgcttcctggctacaagtacctcggacccttcaacggactcgacaagggggagcccgtcaacgcggcggacgcggcggccctcgagcacgacaaggcctacgaccagcagctgcaggcgggtgacaatccgtacctgcggtataaccacgccgacgccgagtttcaggagcgtctgcaagaagatacgtcttttgggggcaacctcgggcgagcagtcttccaggccaagaagcgggttctcgaacctctcggtctggttgaggaaggcgctaagacggctcctggaaagaagagaccggtagagccatcaccccagcgttctccagactcctctacgggcatcggcaagaagggccaacagcccgccagaaaaagactcaattttggtcagactggcgactcagagtcagttccagaccctcaacctctcggagaacctccagcagcgccctctggtgtgggacctaatacaatggctgcaggcggtggcgcaccaatggcagacaataacgaaggcgccgacggagtgggtagttcctcgggaaattggcattgcgattccacatggctgggcgacagagtcatcaccaccagcacccgaacctgggccctgcccacctacaacaaccacctctacaagcaaatctccaacgggacatcgggaggagccaccaacgacaacacctacttcggctacagcaccccctgggggtattttgactttaacagattccactgccacttttcaccacgtgactggcagcgactcatcaacaacaactggggattccggcccaagagactcagcttcaagctcttcaacatccaggtcaaggaggtcacgcagaatgaaggcaccaagaccatcgccaataacctcaccagcaccatccaggtgtttacggactcggagtaccagctgccgtacgttctcggctctgcccaccagggctgcctgcctccgttcccggcggacgtgttcacgattccccagtacggctacctaacactcaacaacggtagtcaggccgtgggacgctcctccttctactgcctggaatactttccttcgcagatgctgagaaccggcaacaacttccagtttacttacaccttcgaggacgcgcctttccacagcagctacgcccacagccagagcttggaccggctgatgaatcctctgattgaccagtacctgtactacttgtctcggattcaaacaacaggaggcacggcaaatacgcagactctgggcttcagccaaggtgggcctaatacaatggccaatcaggcaaagaactggctgccaggaccctgttaccgccaacaacgcgtctcaacgacaaccgggcaaaacaacaatagcaactttgcctggactgctgggaccaaataccatctgaatggaagaaattcattggctaatcctggcatcgctatggcaacacacaaagacgacgaggagcgtttttttcccagtaacgggatcctgatttttggcaaacaaaatgctgccagagacaatgcggattacagcgatgtcatgcccaccagcgaggaagaaatcaaaaccactaaccctgtggccacagaggaatacggtatcgtggcagataacttgcagcagcaaaacacggctcctcaaattggaactgtcaacagccagggggccttacccggtatggtctggcagaaccgggacgtgtacctgcagggtcccatctgggccaagattcctcacacggacggcaacttccacccgtctccgctgatgggcggctttggcctgaaacatcctccgcctcagatcctgatcaagaacacgcctgtacctgcggatcctccgaccaccttcaaccagtcaaagctgaactctttcatcacgcaatacagcaccggacaggtcagcgtggaaattgaatgggagctgcagaaggaaaacagcaagcgctggaaccccgagatccagtacacctccaactactacaaatctacaagtgtggactttgctgttaatacagaaggcgtgtactctgaaccccgccccattggcacccgttacctcacccgtaatctgtaa

SEQ ID NO: 3940 - DNA, 2217 bp, Artificial Sequence
  source: /note="Description of Artificial Sequence: Synthetic polynucleotide"
atggctgccgatggttatcttccagattggctcgaggacaacctctctgagggcattcgcgagtggtgggcgctgaaacctggagccccgaagcccaaagccaaccagcaaaagcaggacgacggccggggtctggtgcttcctggctacaagtacctcggacccttcaacggactcgacaagggggagcccgtcaacgcggcggacgcggcggccctcgagcacgacaaggcctacgaccagcagctgcaggcgggtgacaatccgtacctgcggtataaccacgccgacgccgagtttcaggagcgtctgcaagaagatacgtcttttgggggcaacctcgggcgagcagtcttccaggccaagaagcgggttctcgaacctctcggtctggttgaggaaggcgctaagacggctcctggaaagaagagaccggtagagccatcaccccagcgttctccagactcctctacgggcatcggcaagaagggccaacagcccgccagaaaaagactcaattttggtcagactggcgactcagagtcagttccagaccctcaacctctcggagaacctccagcagcgccctctggtgtgggacctaatacaatggctgcaggcggtggcgcaccaatggcagacaataacgaaggcgccgacggagtgggtagttcctcgggaaattggcattgcgattccacatggctgggcgacagagtcatcaccgccagcacccgaacctgggccctgcccacctacaacaaccacctctacaagcaaatctccaacgggacatcgggaggagccaccaacgacaacacctacttcggctacagcaccccctgggggtattttgactttaacagattccactgccacttttcaccacgtgactggcagcgactcatcaacaacaactggggattccggcccaagagactcagcttcaagctcttcaacatccaggtcaaggaggtcacgcagaatgaaggcaccaagaccatcgccaataacctcaccagcaccatccaggtgtttacggactcggagtaccagctgccgtacgttctcggctctgcccaccagggctgcctgcctccgttcccggcggacgtgttcacgattccccagtacggctacctaacactcaacaacggtagtcaggccgtgggacgctcctccttctactgcctggaatactttccttcgcagatgctgagaaccggcaacaacttccagtttacttacaccttcgaggacgtgcctttccacagcagctacgcccacagccagagcttggaccggctgatgaatcctctgattgaccagtacctgtactacttgtctcggattcaaacaacaggaggcacggcaaatacgcagactctgggcttcagccaaggtgggcctaatacaatggccaatcaggcaaagaactggctgccaggaccctgttaccgccaacaacgcgtctcaacgacaaccgggcaaaacaacaatagcaactttgcctggactgctgggaccaaataccatctgaatggaagaaattcattggctaatcctggcatcgctatggcaacacacaaagacgacgaggagcgtttttttcccagtaacgggatcctgatttttggcaaacaaaatgctgccagagacaatgcggattacagcgatgtcatgcccaccagcgaggaagaaatcaaaaccactaaccctgtggccacagaggaatacggtatcgtggcagataacttgcagcagcaaaacacggctcctcaaattggaactgtcaacagccagggggccttacccggtatggtctggcagaaccgggacgtgtacctgcagggtcccatctgggccaagattcctcacacggacggcaacttccacccgtctccgctgatgggcggctttggcctgaaacatcctccgcctcagatcctgatcaagaacacgcctgtacctgcggatcctccgaccaccttcaaccagtcaaagctgaactctttcatcacgcaatacagcaccggacaggtcagcgtggaaattgaatgggagctgcagaaggaaaacagcaagcgctggaaccccgagatccagtacacctccaactactacaaatctacaagtgtggactttgctgttaatacagaaggcgtgtactctgaaccccgccccattggcacccgttacctcacccgtaatctgtaa

SEQ ID NO: 3941 - DNA, 2217 bp, Artificial Sequence
  source: /note="Description of Artificial Sequence: Synthetic polynucleotide"
atggctgccgatggttatcttccagattggctcgaggacaacctctctgagggcattcgcgagtggtgggcgctgaaacctggagccccgaagcccaaagccaaccagcaaaagcaggacgacggccggggtctggtgcttcctggctacaagtacctcggacccttcaacggactcgacaagggggagcccgtcaacgcggcggacgcggcggccctcgagcacgacaaggcctacgaccagcagctgcaggcgggtgacaatccgtacctgcggtataaccacgccgacgccgagtttcaggagcgtctgcaagaagatacgtcttttgggggcaacctcgggcgagcagtcttccaggccaagaagcgggttctcgaacctctcggtctggttgaggaaggcgctaagacggctcctggaaagaagagaccggtagagccatcaccccagcgttctccagactcctctacgggcatcggcaagaagggccaacagcccgccagaaaaagactcaattttggtcagactggcgactcagagtcagttccagaccctcaacctctcggagaacctccagcagcgccctctggtgtgggacctaatacaatggctgcaggcggtggcgcaccaatggcagacaataacgaaggcgccgacggagtgggtagttcctcgggaaattggcattgcgattccacatggctgggcgacagagtcatcaccaccagcacccgaacctgggccctgcccacctacaacaaccacctctacaagcaaatctccaacgggacatcgggaggagccaccaacgacaacacctacttcggctacagcaccccctgggggtattttgactttaacagattccactgccacttttcaccacgtgactggcagcgactcatcaacaacaactggggattccggcccaagagactcagcttcaagctcttcaacatccaggtcaaggaggtcacgcagaatgaaggcaccaagaccatcgccaataacctcaccagcaccatccaggtgtttacggactcggagtaccagctgccgtacgttctcggctctgcccaccagggctgcctgcctccgttcccggcggacgtgttcacgattccccagtacggctacctaacactcaacaacggtagtcaggccgtgggacgctcctccttctactgcctggaatactttccttcgcagatgctgagaaccggcaacaacttccagtttacttacaccttcgaggacgtgcctttccacagcagctacgcccacagccagagcttggaccggctgatgaatcctctgattgaccagtacctgtactacttgtctcggattcaaacaacaggaggcacggcaaatacgcagactctgggcttcagccaaggtgggcctaatacaatggccaatcaggcaaagaactggctgccaggaccctgttaccgccaacaacgcgtctcaacgacaaccgggcaaaacaacaatagcaactttgcctggactgctgggaccaaataccatctgaatggaagaaattcattggctaatcctggcatcgctatggcaacacacaaagacgacgaggagcgtttttttcccagtaacgggatcctgatttttggcaaacaaaatgctgccagagacaatgcggattacagcgatgtcatgcccaccagcgaggaagaaatcaaaaccactaaccctgtggccacagaggaatacggtatcgtggcagataacttgcagcagcaaaacacggctcctcaaattggaactgtcaacagccagggggccttacccggtatggtctggcagaaccgggacgtgtacctgcagggtcccatctgggccaagattcctcacacggacggcaacttccacccgtctccgctgatgggcggctttggcctgaaacatcctccgcctcagatcctgatcaagaacacgcctgtacctgcggatcctccgaccaccttcaaccagtcaaagctgaactctttcatcacgcaatacagcaccggacaggtcagcgtggaaattgaatgggagctgcagaaggaaaacagcaagcgccggaaccccgagatccagtacacctccaactactacaaatctacaagtgtggactttgctgttaatacagaaggcgtgtactctgaaccccgccccattggcacccgttacctcacccgtaatctgtaa

SEQ ID NO: 3942 - DNA, 2217 bp, Artificial Sequence
  source: /note="Description of Artificial Sequence: Synthetic polynucleotide"
atggctgccgatggttatcttccagattggctcgaggacaacctctctgagggcattcgcgagtggtgggcgctgaaacctggagccccgaagcccaaagccaaccagcaaaagcaggacgacggccggggtctggtgcttcctggctacaagtacctcggacccttcaacggactcgacaagggggagcccgtcaacgcggcggacgcggcggccctcgagcacgacaaggcctacgaccagcagctgcaggcgggtgacaatccgtacctgcggtataaccacgccgacgccgagtttcaggagcgtctgcaagaagatacgtcttttgggggcaacctcgggcgagcagtcttccaggccaagaagcgggttctcgaacctctcggtctggttgaggaaggcgctaagacggctcctggaaagaagagaccggtagagccatcaccccagcgttctccagactcctctacgggcatcggcaagaagggccaacagcccgccagaaaaagactcaattttggtcagactggcgactcagagccagttccagaccctcaacctctcggagaacctccagcagcgccctctggtgtgggacctaatacaatggctgcaggcggtggcgcaccaatggcagacaataacgaaggcgccgacggagtgggtagttcctcgggaaattggcattgcgattccacatggctgggcgacagagtcatcaccaccagcacccgaacctgggccctgcccacctacaacaaccacctctacaagcaaatctccaacgggacatcgggaggagccaccaacgacaacacctacttcggctacagcaccccctgggggtattttgactttaacagattccactgccacttttcaccacgtgactggcagcgactcatcaacaacaactggggattccggcccaagagactcagcttcaagctcttcaacatccaggtcaaggaggtcacgcagaatgaaggcaccaagaccatcgccaataacctcaccagcaccatccaggtgtttacggactcggagtaccagctgccgtacgttctcggctctgcccaccagggctgcctgcctccgttcccggcggacgtgttcacgattccccagtacggctacctaacactcaacaacggtagtcaggccgtgggacgctcctccttctactgcctggaatactttccttcgcagatgctgagaaccggcaacaacttccagtttacttacaccttcgaggacgtgcctttccacagcagctacgcccacagccagagcttggaccggctgatgaatcctctgattgaccagtacctgtactacttgtctcggattcaaacaacaggaggcacggcaaatacgcagactctgggcttcagccaaggtgggcctaatacaatggccaatcaggcaaagaactggctgccaggaccctgttaccgccaacaacgcgtctcaacgacaaccgggcaaaacaacaatagcaactttgcctggactgctgggaccaaataccatctgaatggaagaaattcattggctaatcctggcatcgctatggcaacacacaaagacgacgaggagcgtttttttcccagtaacgggatcctgatttttggcaaacaaaatgctgccagagacaatgcggattacagcgatgtcatgcccaccagcgaggaagaaatcaaaaccactaaccctgtggccacagaggaatacggtatcgtggcagataacttgcagcagcaaaacacggctcctcaaattggaactgtcaacagccagggggccttacccggtatggtctggcagaaccgggacgtgtacctgcagggtcccatctgggccaagattcctcacacggacggcaacttccacccgtctccgctgatgggcggctttggcctgaaacatcctccgcctcagatcctgatcaagaacacgcctgtacctgcggatcctccgaccaccttcaaccagtcaaagctgaactctttcatcacgcaatacagcaccggacaggtcagcgtggaaattgaatgggagctgcagaaggaaaacagcaagcgctggaaccccgagatccagtacacctccaactactacaaatctacaagtgtggactttgctgttaatacagaaggcgtgtactctgaaccccgccccattggcacccgttacctcacccgtaatctgtaa

SEQ ID NO: 3943 - DNA, 2217 bp, Artificial Sequence
  source: /note="Description of Artificial Sequence: Synthetic polynucleotide"
atggctgccgatggttatcttccagattggctcgaggacaacctctctgagggcattcgcgagtggtgggcgctgaaacctggagccccgaagcccaaagccaaccagcaaaagcaggacgacggccggggtctggtgcttcctggctacaagtacctcggacccttcaacggactcgacaagggggagcccgtcaacgcggcggacgcggcggccctcgagcacgacaaggcctacgaccagcagctgcaggcgggtgacaatccgtacctgcggtataaccacgccgacgccgagtttcaggagcgtctgcaagaagatacgtcttttgggggcaacctcgggcgagcagtcttccaggccaagaagcgggttctcgaacctctcggtctggttgaggaaggcgctaagacggctcctggaaagaagagaccggtagagccatcaccccagcgttctccagactcctctacgggcatcggcaagaagggccaacagcccgccagaaaaagactcaattttggtcagactggcgactcagagtcagttccagaccctcaacctctcggagaacctccagcagcgccctctggtgtgggacctaatacaatggctgcaggcggtggcgcaccaatggcagacaataacgaaggcgccgacggagtgggtagttcctcgggaaattggcattgcgattccacatggctgggcgacagagtcatcaccaccagcacccgaacctgggccctgcccacctacaacaaccacctctacaagcaaatctccaacgggacatcgggaggagccaccaacgacaacacctacttcggctacagcaccccctgggggtattttgactttaacagattccactgccacttttcaccacgtgactggcagcgactcatcaacaacaactggggattccggcccaagagactcagcttcaagctcttcaacatccaggtcaaggaggtcacgcagaatgaaggcaccaagaccatcgccaataacctcaccagcaccatccaggtgtttacggactcggagtaccagctgccgtacgttctcggctctgcccaccagggctgcctgcctccgttcccggcggacgtgttcacgattccccagtacggctacctaacactcaacaacggtagtcaggccgtgggacgctcctccttctactgcctggaatactttccttcgcagatgctgagaaccggcaacaacttccagtttacttacaccttcgaggacgtgcctttccacagcagctacgcccacagccagagcttggaccggctgatgaatcctctgattgaccagtacctgtactacttgtctcggattcaaacaacaggaggcacggcaaatacgcagactctgggcttcagccaaggtgggcctaatacaatggccaatcaggcaaagaactggctgccaggaccctgttaccgccaacaacgcgtctcaacgacaaccgggcaaaacaacaatagcaactttgcctggactgctgggaccaaataccatctgaatggaagaaattcattggctaatcctggcatcgctatggcaacacacaaagacgacgaggagcgtttttttcccagtaacgggatcccgatttttggcaaacaaaatgctgccagagacaatgcggattacagcgatgtcatgcccaccagcgaggaagaaatcaaaaccactaaccctgtggccacagaggaatacggtatcgtggcagataacttgcagcagcaaaacacggctcctcaaattggaactgtcaacagccagggggccttacccggtatggtctggcagaaccgggacgtgtacctgcagggtcccatctgggccaagattcctcacacggacggcaacttccacccgtctccgctgatgggcggctttggcctgaaacatcctccgcctcagatcctgatcaagaacacgcctgtacctgcggatcctccgaccaccttcaaccagtcaaagctgaactctttcatcacgcaatacagcaccggacaggtcagcgtggaaattgaatgggagctgcagaaggaaaacagcaagcgctggaaccccgagatccagtacacctccaactactacaaatctacaagtgtggactttgctgttaatacagaaggcgtgtactctgaaccccgccccattggcacccgttacctcacccgtaatctgtaa

SEQ ID NO: 3944 - DNA, 2217 bp, Artificial Sequence
  source: /note="Description of Artificial Sequence: Synthetic polynucleotide"
atggctgccgatggttatcttccagattggctcgaggacaacctctctgagggcattcgcgagtggtgggcgctgaaacctggagccccgaagcccaaagccaaccagcaaaagcaggacgacggccggggtctggtgcttcctggctacaagtacctcggacccttcaacggactcgacaagggggagcccgtcaacgcggcggacgcggcggccctcgagcacgacaaggcctacgaccagcagctgcaggcgggtgacaatccgtacctgcggtataaccacgccgacgccgagtttcaggagcgtctgcaagaagatacgtcttttgggggcaacctcgggcgagcagtcttccaggccaagaagcgggttctcgaacctctcggtctggttgaggaaggcgctaagacggctcctggaaagaagagaccggtagagccatcaccccagcgttctccagactcctctacgggcatcggcaagaagggccaacagcccgccagaaaaagactcaattttggtcagactggcgactcagagtcagttccagaccctcaacctctcggagaacctccagcagcgccctctggtgtgggacctaatacaatggctgcaggcggtggcgcaccaatggcagacaataacgaaggcgccgacggagtgggtagttcctcgggaaattggcattgcgattccacatggctgggcgacagagtcatcaccaccagcacccgaacctgggccctgcccacctacaacaaccacctctacaagcaaatctccaacgggacatcgggaggagccaccaacgacaacacctacttcggctacagcaccccctgggggtattttgactttaacagattccactgccacttttcaccacgtgactggcagcgactcatcaacaacaactggggattccggcccaagagactcagcttcaagctcttcaacatccaggtcaaggaggtcacgcagaatgaaggcaccaagaccatcgccaataacctcaccagcaccatccaggtgtttacggactcggagtaccagctgccgtacgttctcggctctgcccaccagggctgcctgcctccgttcccggcggacgtgttcacgattccccagtacggctacctaacactcaacaacggtagtcaggccgtgggacgctcctccttctactgcctggaatactttccttcgcagatgctgagaaccggcaacaacttccagtttacttacaccttcgaggacgtgcctttccacagcagctacgcccacagccagagcttggaccggctgatgaatcctctgattgaccagtacctgtactacttgtctcggattcaaacaacaggaggcacggcaaatacgcagactctgggcttcagccaaggtgggcctaatacaatggccaatcaggcaaagaactggctgccaggaccctgttaccgccaacaacgcgtctcaacgacaaccgggcaaaacaacaatagcaactttgcctggactgctgggaccaaataccatctgaatggaagaaattcattggctaatcctggcatcgctatggcaacacacaaagacgacgaggagcgtttttttcccagtaacgggatcctgatttttggcaaacaaaatgctgccagagacaatgcggattacagcgatgtcatgcccaccagcgaggaagaaatcaaaaccactaaccctgtggccacagaggaatacggtatcgtggcagataacttgcagcagcaaaacacggctcctcaaattggaactgtcaacagccagggggccttacccggtatggtctggcagaaccgggacgtgtacctgcagggtcccatctgggccaagattcctcacacggacggcaacttccacccgtctccgctgatgggcggctttggcctgaaacatcctccgcctcagatcctgatcaagaacacgcctgtacctgcggatcctccgaccaccttcaaccagtcaaagctgaactctttcatcacgcaatacagcaccggacaggtcagcgtggaaattgaatgggagctgcagaaggaaaacagcaagcgctggaaccccgagatccagcacacctccaactactacaaatctacaagtgtggactttgctgttaatacagaaggcgtgtactctgaaccccgccccattggcacccgttacctcacccgtaatctgtaa

SEQ ID NO: 3945 - DNA, 2217 bp, Artificial Sequence
  source: /note="Description of Artificial Sequence: Synthetic polynucleotide"
atggctgccgatggttatcttccagattggctcgaggacaacctctctgagggcattcgcgagtggtgggcgctgaaacctggagccccgaagcccaaagccaaccagcaaaagcaggacgacggccggggtctggtgcttcctggctacaagtacctcggacccttcaacggactcgacaagggggagcccgtcaacgcggcggacgcggcggccctcgagcacgacaaggcctacgaccagcagctgcaggcgggtgacaatccgtacctgcggtataaccacgccgacgccgagtttcaggagcgtctgcaagaagatacgtcttttgggggcaacctcgggcgagcagtcttccaggccaagaagcgggttctcgaacctctcggtctggttgaggaaggcgctaagacggctcctggaaagaagagaccggtagagccatcaccccagcgttctccagactcctctacgggcatcggcaagaagggccaacagcccgccagaaaaagactcaattttggtcagactggcgactcagagtcagttccagaccctcaacctctcggagaacctccagcagcgccctctggtgtgggacctaatacaatggctgcaggcggtggcgcaccaatggcagacaataacgaaggcgccgacggagtgggtagttcctcgggaaattggcattgcgattccacatggctgggcgacagagtcatcaccaccagcacccgaacctgggccctgcccacctacaacaaccacctctacaagcaaatctccaacgggacatcgggaggagccaccaacgacaacacctacttcggctacagcaccccctgggggtattttgactttaacagattccactgccacttttcaccacgtgactggcagcgactcatcaacaacaactggggattccggcccaagagactcagcttcaagctcttcaacatccaggtcaaggaggtcacgcagaatgaaggcaccaagaccatcgccaataacctcaccagcaccatccaggtgtttacggactcggagtaccagctgccgtacgttctcggctctgcccaccagggctgcctgcctccgttcccggcggacgtgttcacgattccccagtacggctacctaacactcaacaacggtagtcaggccgtgggacgctcctccttctactgcctggaatactttccttcgcagatgctgagaaccggcaacaacttccagtttacttacaccttcgaggacgtgcctttccacagcagctacgcccacagccagagcttggaccggctgatgaatcctctgattgaccagtacctgtactacttgtctcggattcaaacaacaggaggcacggcaaatacgcagactctgggcttcagccaaggtgggcctaatacaatggccaatcaggcaaagaactggctgccaggaccctgttaccgccaacaacgcgtctcaacgacaaccgggcaaaacaacaatagcaactttgcctggactgctgggaccaaataccatctgaatggaagaaattcattggctaatcctggcatcgctatggcaacacacaaagacgacgaggagcgtttttttcccagtaacgggatcctgatttttggcaaacaaaatgctgccagagacaatgcggattacagcgatgtcatgcccaccagcgaggaagaaatcaaaaccactaaccctgtggccacagaggaatacggtatcgtggcagataacttgcagcagcaaaacacggctcctcaaattggaactgtcaacagccagggggccttacccggtatggtctggcagaaccgggacgtgtacctgcagggtcccatctgggccaagattcctcacacggacggcaacttccacccgtctccgctgatgggcggctttggcctgaaacatcctccgcctcagatcctgatcaagaacacgcctgtacctgcggatcctccgaccaccttcaaccagtcaaagctgaaccctttcatcacgcaatacagcaccggacaggtcagcgtggaaattgaatgggagctgcagaaggaaaacagcaagcgctggaaccccgagatccagtacacctccaactactacaaatctacaagtgtggactttgctgttaatacagaaggcgtgtactctgaaccccgccccattggcacccgttacctcacccgtaatctgtaa

SEQ ID NO: 3946 - DNA, 2217 bp, Artificial Sequence
  source: /note="Description of Artificial Sequence: Synthetic polynucleotide"
atggctgccgatggttatcttccagattggctcgaggacaacctctctgagggcattcgcgagtggtgggcgctgaaacctggagccccgaagcccaaagccaaccagcaaaagcaggacgacggccggggtctggtgcttcctggctacaagtacctcggacccttcaacggactcgacaagggggagcccgtcaacgcggcggacgcggcggccctcgagcacgacaaggcctacgaccagcagctgcaggcgggtgacaatccgtacctgcggtataaccacgccgacgccgagtttcaggagcgtctgcaagaagatacgtcttttgggggcaacctcgggcgagcagtcttccaggccaagaagcgggttctcgaacctctcggtctggttgaggaaggcgctaagacggctcctggaaagaagagaccggtagagccatcaccccagcgttctccagactcctctacgggcatcggcaagaagggccaacagcccgccagaaaaagactcaattttggtcagactggcgactcagagtcagttccagaccctcaacctctcggagaacctccagcagcgccctctggtgtgggacctaatacaatggctgcaggcggtggcgcaccaatggcagacaataacgaaggcgccgacggagtgggtagttcctcgggaaattggcattgcgattccacatggctgggcgacagagtcatcaccaccagcacccgaacctgggccctgcccacctacaacaaccacctctacaagcaaatctccaacgggacatcgggaggagccaccaacgacaacacctacttcggctacagcaccccctgggggtattttgactttaacagattccactgccacttttcaccacgtgactggcagcgactcatcaacaacaactggggattccggcccaagagactcagcttcaagctcttcaacatccaggtcaaggaggtcacgcagaatgaaggcaccaagaccatcgccaataacctcaccagcaccatccaggtgtttacggactcggagtaccagctgccgtacgttctcggctctgcccaccagggctgcctgcctccgttcccggcggacgtgttcacgattccccagtacggctacctaacactcaacaacggtagtcaggccgtgggacgctcctccttctactgcctggaatactttccttcgcagatgctgagaaccggcaacaacttccagtttacttacaccttcgaggacgtgcctttccacagcagctacgcccacagccagagcttggaccggctgatgaatcctctgattgaccagtacctgtactacttgtctcggattcaaacaacaggaggcacggcaaatacgcagactctgggcttcagccaaggtgggcctaatacaatggccaatcaggcaaagaactggctgccaggaccctgttaccgccaacaacgcgtctcaacgacaaccgggcaaaacaacaatagcaactttgcctggactgctgggaccaaataccatctgaatggaagaaattcattggctaatcctggcatcgctatggcaacacacaaagacgacgaggagcgtttttttcccagtaacgggatcctgatttttggcaaacaaaatgctgccagagacaatgcggattacagcgatgtcatgcccaccagcgaggaagaaatcaaaaccactaaccctgtggccacagaggaatacggtatcgtggcagataacttgcagcagcaaaacacggctcctcaaattggaactgtcaacagccagggggccttacccggtatggtctggcagaaccgggacgtgtacctgcagggtcccatctgggccaagattcctcacacggacggcaacttccgcccgtctccgctgatgggcggctttggcctgaaacatcctccgcctcagatcctgatcaagaacacgcctgtacctgcggatcctccgaccaccttcaaccagtcaaagctgaactctttcatcacgcaatacagcaccggacaggtcagcgtggaaattgaatgggagctgcagaaggaaaacagcaagcgctggaaccccgagatccagtacacctccaactactacaaatctacaagtgtggactttgctgttaatacagaaggcgtgtactctgaaccccgccccattggcacccgttacctcacccgtaatctgtaa

SEQ ID NO: 3947 - DNA, 2217 bp, Artificial Sequence
  source: /note="Description of Artificial Sequence: Synthetic polynucleotide"
atggctgccgatggttatcttccagattggctcgaggacaacctctctgagggcattcgcgagtggtgggcgctgaaacctggagccccgaagcccaaagccaaccagcaaaagcaggacgacggccggggtctggtgcttcctggctacaagtacctcggacccttcaacggactcgacaagggggagcccgtcaacgcggcggacgcggcggccctcgagcacgacaaggcctacgaccagcagctgcaggcgggtgacaatccgtacctgcggtataaccacgccgacgccgagtttcaggagcgtctgcaagaagatacgtcttttgggggcaacctcgggcgagcagtcttccaggccaagaagcgggttctcgaacctctcggtctggttgaggaaggcgctaagacggctcctggaaagaagagaccggtagagccatcaccccagcgttctccagactcctctacgggcatcggcaagaagggccaacagcccgccagaaaaagactcaattttggtcagactggcgactcagagtcagttccagaccctcaacctctcggagaacctccagcagcgccctctggtgtgggacctaatacaatggctgcaggcggtggcgcaccaatggcagacaataacgaaggcgccgacggagtgggtagttcctcgggaaattggcattgcgattccacatggctgggcgacagagtcatcaccaccagcacccgaacctgggccctgcccacctacaacaaccacctctacaagcaaatctccaacgggacatcgggaggagccaccaacgacaacacctacttcggctacagcaccccctgggggtattttgactttaacagattccactgccacttttcaccacgtgactggcagcgactcatcaacaacaactggggattccggcccaagagactcagcttcaagctcttcaacatccaggtcaaggaggtcacgcagaatgaaggcaccaagaccatcgccaataacctcaccagcaccatccaggtgtttacggactcggagtaccagctgccgtacgttctcggctctgcccaccagggctgcctgcctccgttcccggcggacgtgttcacgattccccagtacggctacctaacactcaacaacggtagtcaggccgtgggacgctcctccttctactgcctggaatactttccttcgcagatgctgagaaccggcaacaacttccagtttacttacaccttcgaggacgtgcctttccacagcagctacgcccacagccagagcttggaccggctgatgaatcctctgattgaccagtacctgtactacttgtctcggattcaaacaacaggaggcacggcaaatacgcagactctgggcttcagccaaggtgggcctaatacaatggccaatcaggcaaagaactggctgccaggaccctgttaccgccaacaacgcgtctcaacgacaaccgggcaaaacaacaatagcaactttgcctggactgctgggaccaaataccatctgaatggaagaaattcattggctaatcctggcatcgctatggcaacacacaaagacgacgaggagcgtttttttcccagtaacgggatcctgatttttggcaaacaaaatgctgccagagacaatgcggattacagcgatgtcatgcccaccagcgaggaagaaatcaaaaccactaaccctgtggccacagaggaatacggtatcgtggcagataacttgcagcagcaaaacacggctcctcaaattggaactgtcaacagccagggggccttacccggtatggtctggcagaaccgggacgtgtacctgcagggtcccatctgggccaagattcctcacacggacggcaacttccacccgtctccgctgatgggcggctttggcctgaaacatcctccgcctcagatcctgatcaagaacacgcctgtacctgcggatcctccgaccaccttcaaccagtcaaagctgaactctttcatcacgcaatacagcaccggacaggtcagcgtggaaattgaatgggagctgcagaaggaaaacagcaagcgctggaaccccgagatccagtacacctccaactactacaaatctacaagtgtggactttgctgttaatacagaaggcgtgtactctgaaccccgccccattggcgcccgttacctcacccgtaatctgtaa

SEQ ID NO: 3948 - DNA, 2217 bp, Artificial Sequence
  source: /note="Description of Artificial Sequence: Synthetic polynucleotide"
atggctgccgatggttatcttccagattggctcgaggacaacctctctgagggcattcgcgagtggtgggcgctgaaacctggagccccgaagcccaaagccaaccagcaaaagcaggacgacggccggggtctggtgcttcctggctacaagtacctcggacccttcaacggactcgacaagggggagtccgtcaacgcggcggacgcggcggccctcgagcacgacaaggcctacgaccagcagctgcaggcgggtgacaatccgtacctgcggtataaccacgccgacgccgagtttcaggagcgtctgcaagaagatacgtcttttgggggcaacctcgggcgagcagtcttccaggccaagaagcgggttctcgaacctctcggtctggttgaggaaggcgctaagacggctcctggaaagaagagaccggtagagccatcaccccagcgttctccagactcctctacgggcatcggcaagaagggccaacagcccgccagaaaaagactcaattttggtcagactggcgactcagagtcagttccagaccctcaacctctcggagaacctccagcagcgccctctggtgtgggacctaatacaatggctgcaggcggtggcgcaccaatggcagacaataacgaaggcgccgacggagtgggtagttcctcgggaaattggcattgcgattccacatggctgggcgacagagtcatcaccaccagcacccgaacctgggccctgcccacctacaacaaccacctctacaagcaaatctccaacgggacatcgggaggagccaccaacgacaacacctacttcggctacagcaccccctgggggtattttgactttaacagattccactgccacttttcaccacgtgactggcagcgactcatcaacaacaactggggattccggcccaagagactcagcttcaagctcttcaacatccaggtcaaggaggtcacgcagaatgaaggcaccaagaccatcgccaataacctcaccagcaccatccaggtgtttacggactcggagtaccagctgccgtacgttctcggctctgcccaccagggctgcctgcctccgttcccggcggacgtgttcacgattccccagtacggctacctaacactcaacaacggtagtcaggccgtgggacgctcctccttctactgcctggaatactttccttcgcagatgctgagaaccggcaacaacttccagtttacttacaccttcgaggacgtgcctttccacagcagctacgcccacagccagagcttggaccggctgatgaatcctctgattgaccagtacctgtactacttgtctcggattcaaacaacaggaggcacggcaaatacgcagactctgggcttcagccaaggtgggcctaatacaatggccaatcaggcaaagaactggctgccaggaccctgttaccgccaacaacgcgtctcaacgacaaccgggcaaaacaacaatagcaactttgcctggactgctgggaccaaataccatctgaatggaagaaattcattggctaatcctggcatcgctatggcaacacacaaagacgacgaggagcgtttttttcccagtaacgggatcctgatttttggcaaacaaaatgctgccagagacaatgcggattacagcgatgtcatgcccaccagcgaggaagaaatcaaaaccactaaccctgtggccacagaggaatacggtatcgtggcagataacttgcagcagcaaaacacggctcctcaaattggaactgtcaacagccagggggccttacccggtatggtctggcagaaccgggacgtgtacctgcagggtcccatctgggccaagattcctcacacggacggcaacttccacccgtctccgctgatgggcggctttggcctgaaacatcctccgcctcagatcctgatcaagaacacgcctgtacctgcggatcctccgaccaccttcaaccagtcaaagctgaactctttcatcacgcaatacagcaccggacaggtcagcgtggaaattgaatgggagctgcagaaggaaaacagcaagcgctggaaccccgagatccagtacacctccaactactacaaatctacaagtgtggactttgctgttaatacagaaggcgtgtactctgaaccccgccccattggcacccgttacctcacccgtaatctgtaa

SEQ ID NO: 3949 - DNA, 2217 bp, Artificial Sequence
  source: /note="Description of Artificial Sequence: Synthetic polynucleotide"
atggctgccgatggttatcttccagattggctcgaggacaacctctctgagggcattcgcgagtggtgggcgctgaaacctggagccccgaagcccaaagccaaccagcaaaagcaggacgacggccggggtctggtgcttcctggctacaagtacctcggacccttcaacggactcgacaagggggagcccgtcaacgcggcggacgcggcggccctcgagcacgacaaggcctacgaccagcagctgcaggcgggtgacaatccgtacctgcggtataaccacgccgacgccgagtttcaggagcgtctgcaagaagatacgtcttttgggggcaacctcgggcgagcagtcttccaggccaagaagcgggttctcgaacctctcggtctggttgaggaaggcgctaagacggctcctggaaagaagagaccggtagagccatcaccccagcgttctccagactcctctacgggcatcggcaagaagggccaacagcccgccagaaaaagactcaattttggtcagactggcgactcagagtcagttccagaccctcaacctctcggagaacctccagcagcgccctctggtgtgggacctaatacaatggctgcaggcggtggcgcaccaatggcagacaatagcgaaggcgccgacggagtgggtagttcctcgggaaattggcattgcgattccacatggctgggcgacagagtcatcaccaccagcacccgaacctgggccctgcccacctacaacaaccacctctacaagcaaatctccaacgggacatcgggaggagccaccaacgacaacacctacttcggctacagcaccccctgggggtattttgactttaacagattccactgccacttttcaccacgtgactggcagcgactcatcaacaacaactggggattccggcccaagagactcagcttcaagctcttcaacatccaggtcaaggaggtcacgcagaatgaaggcaccaagaccatcgccaataacctcaccagcaccatccaggtgtttacggactcggagtaccagctgccgtacgttctcggctctgcccaccagggctgcctgcctccgttcccggcggacgtgttcacgattccccagtacggctacctaacactcaacaacggtagtcaggccgtgggacgctcctccttctactgcctggaatactttccttcgcagatgctgagaaccggcaacaacttccagtttacttacaccttcgaggacgtgcctttccacagcagctacgcccacagccagagcttggaccggctgatgaatcctctgattgaccagtacctgtactacttgtctcggattcaaacaacaggaggcacggcaaatacgcagactctgggcttcagccaaggtgggcctaatacaatggccaatcaggcaaagaactggctgccaggaccctgttaccgccaacaacgcgtctcaacgacaaccgggcaaaacaacaatagcaactttgcctggactgctgggaccaaataccatctgaatggaagaaattcattggctaatcctggcatcgctatggcaacacacaaagacgacgaggagcgtttttttcccagtaacgggatcctgatttttggcaaacaaaatgctgccagagacaatgcggattacagcgatgtcatgcccaccagcgaggaagaaatcaaaaccactaaccctgtggccacagaggaatacggtatcgtggcagataacttgcagcagcaaaacacggctcctcaaattggaactgtcaacagccagggggccttacccggtatggtctggcagaaccgggacgtgtacctgcagggtcccatctgggccaagattcctcacacggacggcaacttccacccgtctccgctgatgggcggctttggcctgaaacatcctccgcctcagatcctgatcaagaacacgcctgtacctgcggatcctccgaccaccttcaaccagtcaaagctgaactctttcatcacgcaatacagcaccggacaggtcagcgtggaaattgaatgggagctgcagaaggaaaacagcaagcgctggaaccccgagatccagtacacctccaactactacaaatctacaagtgtggactttgctgttaatacagaaggcgtgtactctgaaccccgccccattggcacccgttacctcacccgtaatctgtaa

SEQ ID NO: 3950 - DNA, 2217 bp, Artificial Sequence
  source: /note="Description of Artificial Sequence: Synthetic polynucleotide"
atggctgccgatggttatcttccagattggctcgaggacaacctctctgagggcattcgcgagtggtgggcgctgaaacctggagccccgaagcccaaagccaaccagcaaaagcaggacgacggccggggtctggtgcttcctggctacaagtacctcggacccttcaacggactcgacaagggggagcccgtcaacgcggcggacgcggcggccctcgagcacgacaaggcctacgaccagcagctgcaggcgggtgacaatccgtacctgcggtataaccacgccgacgccgagtttcaggagcgtctgcaagaagatacgtcttttgggggcaacctcgggcgagcagtcttccaggccaagaagcgggttctcgaacctctcggtctggttgaggaaggcgctaagacggctcctggaaagaagagaccggtagagccatcaccccagcgttctccagactcctctacgggcatcggcaagaagggccaacagcccgccagaaaaagactcaattttggtcagactggcgactcagagtcagttccagaccctcaacctctcggagaacctccagcagcgccctctggtgtgggacctaatacaatggctgcaggcggtggcgcaccaatggcagacaataacgaaggcgccgacggagtgggtagttcctcgggaaattggcattgcgattccacatggctgggcgacagagtcatcaccaccagcacccgaacctgggccctgcccacctacaacaaccacctctacaagcaaatctccaacgggacatcgggaggagccaccaacgacaacacctacttcggctacagcaccccctgggggtattttgactttaacagattccactgccacttttcaccacgtgactggcagcgactcatcaacaacaactggggattccggcccaagagactcagcttcaagctcttcaacatccaggtcaaggaggtcacgcagaatgaaggcaccaagaccatcgccaataacctcaccagcaccatccaggtgtttacggactcggagtaccagctgccgtacgttctcggctctgcccaccagggctgcctgcctccgttcccggcggacgtgttcacgattccccagtacggctacctaacactcaacaacggtagtcaggccgtgggacgctcctccttctactgcctggaatactttccttcgcagatgctgagaaccggcaacaacttccagtttacttacaccttcgaggacgtgcctttccacagcagctacgcccacagccagagcttggaccggctgatgaatcctctgattgaccagtacctgtactacttgtctcggattcaaacaacaggaggcacggcaaatacgcagactctgggcttcagccaaggtgggcctaatacaatggccaatcaggcaaagaactggctgccaggaccctgttaccgccaacaacgcgtctcaacgacaaccgggcaaaacaacaatagcaactttgcctggactgctgggaccaaataccatctgaatggaagaaattcattggctaatcctggcatcgctatggcaacacacaaagacgacgaggagcgtttttttcccagtaacgggatcctgatttttggcaaacaaaatgctgccagagacaatgcggattacggcgatgtcatgcccaccagcgaggaagaaatcaaaaccactaaccctgtggccacagaggaatacggtatcgtggcagataacttgcagcagcaaaacacggctcctcaaattggaactgtcaacagccagggggccttacccggtatggtctggcagaaccgggacgtgtacctgcagggtcccatctgggccaagattcctcacacggacggcaacttccacccgtctccgctgatgggcggctttggcctgaaacatcctccgcctcagatcctgatcaagaacacgcctgtacctgcggatcctccgaccaccttcaaccagtcaaagctgaactctttcatcacgcaatacagcaccggacaggtcagcgtggaaattgaatgggagctgcagaaggaaaacagcaagcgctggaaccccgagatccagtacacctccaactactacaaatctacaagtgtggactttgctgttaatacagaaggcgtgtactctgaaccccgccccattggcacccgttacctcacccgtaatctgtaa

SEQ ID NO: 3951 - DNA, 2217 bp, Artificial Sequence
  source: /note="Description of Artificial Sequence: Synthetic polynucleotide"
atggctgccgatggttatcttccagattggctcgaggacaacctctctgagggcattcgcgagtggtgggcgctgaaacctggagccccgaagcccaaagccaaccagcaaaagcaggacgacggccggggtctggtgcttcctggctacaagtacctcggacccttcaacggactcgacaagggggagcccgtcaacgcggcggacgcggcggccctcgagcacgacaaggcctacgaccagcagctgcaggcgggtgacaatccgtacctgcggtataaccacgccgacgccgagtttcaggagcgtctgcaagaagatacgtcttttgggggcaacctcgggcgagcagtcttccaggccaagaagcgggttctcgaacctctcggtctggttgaggaaggcgctaagacggctcctggaaagaggagaccggtagagccatcaccccagcgttctccagactcctctacgggcatcggcaagaagggccaacagcccgccagaaaaagactcaattttggtcagactggcgactcagagtcagttccagaccctcaacctctcggagaacctccagcagcgccctctggtgtgggacctaatacaatggctgcaggcggtggcgcaccaatggcagacaataacgaaggcgccgacggagtgggtagttcctcgggaaattggcattgcgattccacatggctgggcgacagagtcatcaccaccagcacccgaacctgggccctgcccacctacaacaaccacctctacaagcaaatctccaacgggacatcgggaggagccaccaacgacaacacctacttcggctacagcaccccctgggggtattttgactttaacagattccactgccacttttcaccacgtgactggcagcgactcatcaacaacaactggggattccggcccaagagactcagcttcaagctcttcaacatccaggtcaaggaggtcacgcagaatgaaggcaccaagaccatcgccaataacctcaccagcaccatccaggtgtttacggactcggagtaccagctgccgtacgttctcggctctgcccaccagggctgcctgcctccgttcccggcggacgtgttcacgattccccagtacggctacctaacactcaacaacggtagtcaggccgtgggacgctcctccttctactgcctggaatactttccttcgcagatgctgagaaccggcaacaacttccagtttacttacaccttcgaggacgtgcctttccacagcagctacgcccacagccagagcttggaccggctgatgaatcctctgattgaccagtacctgtactacttgtctcggattcaaacaacaggaggcacggcaaatacgcagactctgggcttcagccaaggtgggcctaatacaatggccaatcaggcaaagaactggctgccaggaccctgttaccgccaacaacgcgtctcaacgacaaccgggcaaaacaacaatagcaactttgcctggactgctgggaccaaataccatctgaatggaagaaattcattggctaatcctggcatcgctatggcaacacacaaagacgacgaggagcgtttttttcccagtaacgggatcctgatttttggcaaacaaaatgctgccagagacaatgcggattacagcgatgtcatgcccaccagcgaggaagaaatcaaaaccactaaccctgtggccacagaggaatacggtatcgtggcagataacttgcagcagcaaaacacggctcctcaaattggaactgtcaacagccagggggccttacccggtatggtctggcagaaccgggacgtgtacctgcagggtcccatctgggccaagattcctcacacggacggcaacttccacccgtctccgctgatgggcggctttggcctgaaacatcctccgcctcagatcctgatcaagaacacgcctgtacctgcggatcctccgaccaccttcaaccagtcaaagctgaactctttcatcacgcaatacagcaccggacaggtcagcgtggaaattgaatgggagctgcagaaggaaaacagcaagcgctggaaccccgagatccagtacacctccaactactacaaatctacaagtgtggactttgctgttaatacagaaggcgtgtactctgaaccccgccccattggcacccgttacctcacccgtaatctgtaa

SEQ ID NO: 3952 - DNA, 2217 bp, Artificial Sequence
  source: /note="Description of Artificial Sequence: Synthetic polynucleotide"
atggctgccgatggttatcttccagattggctcgaggacaacctctctgagggcattcgcgagtggtgggcgctgaaacctggagccccgaagcccaaagccaaccagcaaaagcaggacgacggccggggtctggtgcttcctggctacaagtacctcggacccttcaacggactcgacaagggggagcccgtcaacgcggcggacgcggcggccctcgagcacgacaaggcctacgaccagcagctgcaggcgggtgacaatccgtacctgcggtataaccacgccgacgccgagtttcaggagcgtctgcaagaagatacgtcttttgggggcaacctcgggcgagcagtcttccaggccaagaagcgggttctcgaacctctcggtctggttgaggaaggcgctaagacggctcctggaaagaagagaccggtagagccatcaccccagcgttctccagactcctctacgggcatcggcaagaagggccaacagcccgccagaaaaagactcaattttggtcagactggcgactcagagtcagttccagaccctcaacctctcggagaacctccagcagcgccctctggtgtgggacctaatacaatggctgcaggcggtggcgcaccaatggcagacaataacgaaggcgccgacggagtgggtagttcctcgggaaattggcattgcgattccacatggctgggcgacagagtcatcaccaccagcacccgaacctgggccctgcccacctacaacaaccacctctacaagcaaatctccaacgggacatcgggaggagccaccaacgacaacacctacttcggctacagcaccccctgggggtattttgactttaacagattccactgccacttttcaccacgtgactggcagcgactcatcaacaacaactggggattccggcccaagagactcagcttcaagctcttcaacatccaggtcaaggaggtcacgcagaatgaaggcaccaagaccatcgccaataacctcaccagcaccatccaggtgtttacggactcggagtaccagctgccgtacgttctcggctctgcccaccagggctgcctgcctccgttcccggcggacgtgttcacgattccccagtacggctacctaacactcaacaacggtagtcaggccgtgggacgctcctccttctactgcctggaatactttccttcgcagatgctgagaaccggcaacaacttccagtttacttacaccttcgaggacgtgcctttccacagcagctacgcccacagccagagcttggaccggctgatgaatcctctgattgaccagtacctgtactacttgtctcggattcaaacaacaggaggcacggcaaatacgcagactctgggcttcagccaaggtgggcctaatacaatggccaatcaggcaaagaactggctgccaggaccctgttaccgccaacaacgcgtcccaacgacaaccgggcaaaacaacaatagcaactttgcctggactgctgggaccaaataccatctgaatggaagaaattcattggctaatcctggcatcgctatggcaacacacaaagacgacgaggagcgtttttttcccagtaacgggatcctgatttttggcaaacaaaatgctgccagagacaatgcggattacagcgatgtcatgcccaccagcgaggaagaaatcaaaaccactaaccctgtggccacagaggaatacggtatcgtggcagataacttgcagcagcaaaacacggctcctcaaattggaactgtcaacagccagggggccttacccggtatggtctggcagaaccgggacgtgtacctgcagggtcccatctgggccaagattcctcacacggacggcaacttccacccgtctccgctgatgggcggctttggcctgaaacatcctccgcctcagatcctgatcaagaacacgcctgtacctgcggatcctccgaccaccttcaaccagtcaaagctgaactctttcatcacgcaatacagcaccggacaggtcagcgtggaaattgaatgggagctgcagaaggaaaacagcaagcgctggaaccccgagatccagtacacctccaactactacaaatctacaagtgtggactttgctgttaatacagaaggcgtgtactctgaaccccgccccattggcacccgttacctcacccgtaatctgtaa

SEQ ID NO: 3953 - DNA, 2217 bp, Artificial Sequence
  source: /note="Description of Artificial Sequence: Synthetic polynucleotide"
atggctgccgatggttatcttccagattggctcgaggacaacctctctgagggcattcgcgagtggtgggcgctgaaacctggagccccgaagcccaaagccaaccagcaaaagcaggacgacggccggggtctggtgcttcctggctacaagtacctcggacccttcaacggactcgacaagggggagcccgtcaacgcggcggacgcggcggccctcgagcacgacaaggcctacgaccagcagctgcaggcgggtgacaatccgtacctgcggtataaccacgccgacgccgagtttcaggagcgtctgcaagaagatacgtcttttgggggcaacctcgggcgagcagtcttccaggccaagaagcgggttctcgaacctctcggtctggttgaggaaggcgctaagacggctcctggaaagaagagaccggtagagccatcaccccagcgttctccagactcctctacgggcatcggcaagaagggccaacagcccgccagaaaaagactcaattttggtcagactggcgactcagagtcagttccagaccctcaacctctcggagaacctccagcagcgccctctggtgtgggacctaatacaatggctgcaggcggtggcgcaccaatggcagacaataacgaaggcgccgacggagtgggtagttcctcgggaaattggcattgcgattccacatggctgggcgacagagtcatcaccaccagcacccgaacctgggccctgcccacctacaacaaccacctctacaagcaaatctccaacgggacatcgggaggagccaccaacgacaacacctacttcggctacagcaccccctgggggtattttgactttaacagattccactgccacttttcaccacgtgactggcagcgactcatcaacaacaactggggattccggcccaagagactcagcttcaagctcttcaacatccaggtcaaggaggtcacgcagaatgaaggcaccaagaccatcgccaataacctcaccagcaccatccaggtgtttacggactcggagtaccagctgccgtacgttctcggctctgcccaccagggctgcctgcctccgttcccggcggacgtgttcacgattccccagtacggctacctaacactcaacaacggtagtcaggccgtgggacgctcctccttctactgcctggaatactttccttcgcagatgctgagaaccggcaacaacttccagtttacttacaccttcgaggacgtgcctttccacagcagctacgcccacagccagagcttggaccggctgatgaatcctctgattgaccagtacctgtactacttgtctcggattcaaacaacaggaggcacggcaaatacgcagactctgggcttcagccaaggtgggcctaatacaatggccaatcaggcaaagaactggctgccaggaccctgttaccgccaacaacgcgtctcaacgacaaccgggcaaaacaacaatagcaactttgcctggactgctgggaccaaataccatctgaatggaagaaattcattggctaatcctggcatcgctatggcaacacacaaagacgacgaggagcgtttttttcccagtaacgggatcctgatttttggcaaacaaaatgctgccagagacaatgcggattacagcgatgtcatgcccaccagcgaggaagaaatcaaaaccactaaccctgtggccacagaggaatacggtatcgtggcagataacttgcagcagcaaaacacggctcctcaaattggaactgtcaacagccagggggccttacccggtatggtctggcagaaccgggacgtgtacctgcagggtcccatctgggccaagattcctcacacggacggcaacttccacccgtctccgctgatgggcggctttggcctgaaacatcctccgcctcagatcctgatcaagaacacgcctgtacctgcggatcctccgaccaccttcaaccagtcaaagctgaactctttcatcacgcaatacagcaccggacaggtcagcgtggaaattgaatgggagctgcagaaggaaaacagcaagcgctggaaccccgagatccagtacacctccaactactacaaatctacaagtgtggactttgctgttaatacagaaggcgtgtactctgaaccccgccccattggcacccgttacctcacccgtaatctgtaa

SEQ ID NO: 3954 - DNA, 2217 bp, Artificial Sequence
  source: /note="Description of Artificial Sequence: Synthetic polynucleotide"
atggctgccgatggttatcttccagattggctcgaggacaacctctctgagggcattcgcgagtggtgggcgctgaaacctggagccccgaagcccaaagccaaccagcaaaagcaggacgacggccggggtctggtgcttcctggctacaagtacctcggacccttcaacggactcgacaagggggagcccgtcaacgcggcggacgcggcggccctcgagcacgacaaggcctacgaccagcagctgcaggcgggtgacaatccgtacctgcggtataaccacgccgacgccgagtttcaggagcgtctgcaagaagatacgtcttttgggggcaacctcgggcgagcagtcttccaggccaagaagcgggttctcgaacctctcggtctggttgaggaaggcgctaagacggctcctggaaagaagagaccggtagagccatcaccccagcgttctccagactcctctacgggcatcggcaagaagggccaacagcccgccagaaaaagactcaattttggtcagactggcgactcagagtcagttccagaccctcaacctctcggagaacctccagcagcgccctctggtgtgggacctaatacaatggctgcaggcggtggcgcaccaatggcagacaataacgaaggcgccgacggagtgggtagttcctcgggaaattggcattgcgattccacatggctgggcgacagagtcatcaccaccagcacccgaacctgggccctgcccacctacaacaaccacctctacaagcaaatctccaacgggacatcgggaggagccaccaacgacaacacctacttcggctacagcaccccctgggggtattttgactttaacagattccaccgccacttttcaccacgtgactggcagcgactcatcaacaacaactggggattccggcccaagagactcagcttcaagctcttcaacatccaggtcaaggaggtcacgcagaatgaaggcaccaagaccatcgccaataacctcaccagcaccatccaggtgtttacggactcggagtaccagctgccgtacgttctcggctctgcccaccagggctgcctgcctccgttcccggcggacgtgttcacgattccccagtacggctacctaacactcaacaacggtagtcaggccgtgggacgctcctccttctactgcctggaatactttccttcgcagatgctgagaaccggcaacaacttccagtttacttacaccttcgaggacgtgcctttccacagcagctacgcccacagccagagcttggaccggctgatgaatcctctgattgaccagtacctgtactacttgtctcggattcaaacaacaggaggcacggcaaatacgcagactctgggcttcagccaaggtgggcctaatacaatggccaatcaggcaaagaactggctgccaggaccctgttaccgccaacaacgcgtctcaacgacaaccgggcaaaacaacaatagcaactttgcctggactgctgggaccaaataccatctgaatggaagaaattcattggctaatcctggcatcgctatggcaacacacaaagacgacgaggagcgtttttttcccagtaacgggatcctgatttttggcaaacaaaatgctgccagagacaatgcggattacagcgatgtcatgcccaccagcgaggaagaaatcaaaaccactaaccctgtggccacagaggaatacggtatcgtggcagataacttgcagcagcaaaacacggctcctcaaattggaactgtcaacagccagggggccttacccggtatggtctggcagaaccgggacgtgtacctgcagggtcccatctgggccaagattcctcacacggacggcaacttccacccgtctccgctgatgggcggctttggcctgaaacatcctccgcctcagatcctgatcaagaacacgcctgtacctgcggatcctccgaccaccttcaaccagtcaaagctgaactctttcatcacgcaatacagcaccggacaggtcagcgtggaaattgaatgggagctgcagaaggaaaacagcaagcgctggaaccccgagatccagtacacctccaactactacaaatctacaagtgtggactttgctgttaatacagaaggcgtgtactctgaaccccgccccattggcacccgttacctcacccgtaatctgtaa

SEQ ID NO: 3955 - DNA, 2217 bp, Artificial Sequence
  source: /note="Description of Artificial Sequence: Synthetic polynucleotide"
atggctgccgatggttatcttccagattggctcgaggacaacctctctgagggcattcgcgagtggtgggcgctgaaacctggagccccgaagcccaaagccaaccagcaaaagcaggacgacggccggggtctggtgcttcctggctacaagtacctcggacccttcaacggactcgacaagggggagcccgtcaacgcggcggacgcggcggccctcgagcacgacaaggcctacgaccagcagctgcaggcgggtgacaatccgtacctgcggtataaccacgccgacgccgagtttcaggagcgtctgcaagaagatacgtcttttgggggcaacctcgggcgagcagtcttccaggccaagaagcgggttctcgaacctctcggtctggttgaggaaggcgctaagacggctcctggaaagaagagaccggtagagccatcaccccagcgttctccagactcctctacgggcatcggcaagaagggccaacagcccgccagaaaaagactcaattttggtcagactggcgactcagagtcagttccagaccctcaacctctcggagaacctccagcagcgccctctggtgtgggacctaatacaatggctgcaggcggtggcgcaccaatggcagacaataacgaaggcgccgacggagtgggtagttcctcgggaaattggcattgcgattccacatggctgggcgacagagtcatcaccaccagcacccgaacctgggccctgcccacctacaacaaccacctctacaagcaaatctccaacgggacatcgggaggagccaccaacgacaacacctacttcggctacagcaccccctgggggtattttgactttaacagattccactgccacttttcaccacgtgactggcagcgactcatcaacaacaactggggattccggcccaagagactcagcttcaagctcttcaacatccaggtcaaggaggtcacgcagaatgaaggcaccaagaccatcgccaataacctcaccagcaccatccaggtgtttacggactcggagtgccagctgccgtacgttctcggctctgcccaccagggctgcctgcctccgttcccggcggacgtgttcacgattccccagtacggctacctaacactcaacaacggtagtcaggccgtgggacgctcctccttctactgcctggaatactttccttcgcagatgctgagaaccggcaacaacttccagtttacttacaccttcgaggacgtgcctttccacagcagctacgcccacagccagagcttggaccggctgatgaatcctctgattgaccagtacctgtactacttgtctcggattcaaacaacaggaggcacggcaaatacgcagactctgggcttcagccaaggtgggcctaatacaatggccaatcaggcaaagaactggctgccaggaccctgttaccgccaacaacgcgtctcaacgacaaccgggcaaaacaacaatagcaactttgcctggactgctgggaccaaataccatctgaatggaagaaattcattggctaatcctggcatcgctatggcaacacacaaagacgacgaggagcgtttttttcccagtaacgggatcctgatttttggcaaacaaaatgctgccagagacaatgcggattacagcgatgtcatgcccaccagcgaggaagaaatcaaaaccactaaccctgtggccacagaggaatacggtatcgtggcagataacttgcagcagcaaaacacggctcctcaaattggaactgtcaacagccagggggccttacccggtatggtctggcagaaccgggacgtgtacctgcagggtcccatctgggccaagattcctcacacggacggcaacttccacccgtctccgctgatgggcggctttggcctgaaacatcctccgcctcagatcctgatcaagaacacgcctgtacctgcggatcctccgaccaccttcaaccagtcaaagctgaactctttcatcacgcaatacagcaccggacaggtcagcgtggaaattgaatgggagctgcagaaggaaaacagcaagcgctggaaccccgagatccagtacacctccaactactacaaatctacaagtgtggactttgctgttaatacagaaggcgtgtactctgaaccccgccccattggcacccgttacctcacccgtaatctgtaa

SEQ ID NO: 3956 - DNA, 2217 bp, Artificial Sequence
  source: /note="Description of Artificial Sequence: Synthetic polynucleotide"
atggctgccgatggttatcttccagattggctcgaggacaacctctctgagggcattcgcgagtggtgggcgctgaaacctggagccccgaagcccaaagccaaccagcaaaagcaggacgacggccggggtctggtgcttcctggctacaagtacctcggacccttcaacggactcgacaagggggagcccgtcaacgcggcggacgcggcggccctcgagcacgacaaggcctacgaccagcagctgcaggcgggtgacaatccgtacctgcggtataaccacgccgacgccgagtttcaggagcgtctgcaagaagatacgtcttttgggggcaacctcgggcgagcagtcttccaggccaagaagcgggttctcgaacctctcggtctggttgaggaaggcgctaagacggctcctggaaagaagagaccggtagagccatcaccccagcgttctccagactcctctacgggcatcggcaagaagggccaacagcccgccagaaaaagactcaattttggtcagactggcgactcagagtcagttccagaccctcaacctctcggagaacctccagcagcgccctctggtgtgggacctaatacaatggctgcaggcggtggcgcaccaatggcagacaataacgaaggcgccgacggagtgggtagttcctcgggaaattggcattgcgattccacatggctgggcgacagagtcatcaccaccagcacccgaacctgggccctgcccacctacaacaaccacctctacaagcaaatctccaacgggacatcgggaggagccaccaacgacaacgcctacttcggctacagcaccccctgggggtattttgactttaacagattccactgccacttttcaccacgtgactggcagcgactcatcaacaacaactggggattccggcccaagagactcagcttcaagctcttcaacatccaggtcaaggaggtcacgcagaatgaaggcaccaagaccatcgccaataacctcaccagcaccatccaggtgtttacggactcggagtaccagctgccgtacgttctcggctctgcccaccagggctgcctgcctccgttcccggcggacgtgttcacgattccccagtacggctacctaacactcaacaacggtagtcaggccgtgggacgctcctccttctactgcctggaatactttccttcgcagatgctgagaaccggcaacaacttccagtttacttacaccttcgaggacgtgcctttccacagcagctacgcccacagccagagcttggaccggctgatgaatcctctgattgaccagtacctgtactacttgtctcggattcaaacaacaggaggcacggcaaatacgcagactctgggcttcagccaaggtgggcctaatacaatggccaatcaggcaaagaactggctgccaggaccctgttaccgccaacaacgcgtctcaacgacaaccgggcaaaacaacaatagcaactttgcctggactgctgggaccaaataccatctgaatggaagaaattcattggctaatcctggcatcgctatggcaacacacaaagacgacgaggagcgtttttttcccagtaacgggatcctgatttttggcaaacaaaatgctgccagagacaatgcggattacagcgatgtcatgcccaccagcgaggaagaaatcaaaaccactaaccctgtggccacagaggaatacggtatcgtggcagataacttgcagcagcaaaacacggctcctcaaattggaactgtcaacagccagggggccttacccggtatggtctggcagaaccgggacgtgtacctgcagggtcccatctgggccaagattcctcacacggacggcaacttccacccgtctccgctgatgggcggctttggcctgaaacatcctccgcctcagatcctgatcaagaacacgcctgtacctgcggatcctccgaccaccttcaaccagtcaaagctgaactctttcatcacgcaatacagcaccggacaggtcagcgtggaaattgaatgggagctgcagaaggaaaacagcaagcgctggaaccccgagatccagtacacctccaactactacaaatctacaagtgtggactttgctgttaatacagaaggcgtgtactctgaaccccgccccattggcacccgttacctcacccgtaatctgtaa

SEQ ID NO: 3957 - DNA, 2217 bp, Artificial Sequence
  source: /note="Description of Artificial Sequence: Synthetic polynucleotide"
atggctgccgatggttatcttccagattggctcgaggacaacctctctgagggcattcgcgagtggtgggcgctgaaacctggagccccgaagcccaaagccaaccagcaaaagcaggacgacggccggggtctggtgcttcctggctacaagtacctcggacccttcaacggactcgacaagggggagcccgtcaacgcggcggacgcggcggccctcgagcacgacaaggcctacgaccagcagctgcaggcgggtgacaatccgtacctgcggtataaccacgccgacgccgagtttcaggagcgtctgcaagaagatacgtcttttgggggcaacctcgggcgagcagtcttccaggccaagaagcgggttctcgaacctctcggtctggttgaggaaggcgctaagacggctcctggaaagaagagaccggtagagccatcaccccagcgttctccagactcctctacgggcatcggcaagaagggccaacagcccgccagaaaaagactcaattttggtcagactggcgactcagagtcagttccagaccctcaacctctcggagaacctccagcagcgccctctggtgtgggacctaatacaatggctgcaggcggtggcgcaccaatggcagacaataacgaaggcgccgacggagtgggtagttcctcgggaaattggcattgcgattccacatggctgggcgacagagtcatcaccaccagcacccgaacctgggccctgcccacctacaacaaccacctctacaagcaaatctccaacgggacatcgggaggagccaccaacgacaacacctacttcggctacagcaccccctgggggtattttgactttaacagattccactgccacttttcaccacgtgactggcagcgactcatcaacaacaactggggattccggcccaagagactcagcttcaagctcttcaacatccaggtcaaggaggtcacgcagaatgaaggcaccaagaccatcgccaataacctcaccagcaccatccaggtgtttacggactcggagtaccagctgccgtacgttctcggctctgcccaccagggctgcctgcctccgttcccggcggacgtgttcacgattccccagtacggctacctaacactcaacaacggtagtcaggccgtgggacgctcctccttctactgcctggaatactttccttcgcagatgctgagaaccggcaacaacttccagtttacttacaccttcgaggacgtgcctttccacagcagctacgcccacagccagagcttggaccggctgatgaatcctctgattgaccagtacctgtactacttgtctcggattcaaacaacaggaggcacggcaaatacgcagactctgggcttcagccaaggtgggcctaatacaatggccaatcaggcaaagaactggctgccaggaccctgttaccgccaacaacgcgtctcaacgacaaccgggcaaaacaacaatagcaactttgcctggactgctgggaccaaataccatctgaatggaagaaattcattggctaatcctggcatcgctatggcaacacacaaagacgacgaggagcgtttttttcccagtaacgggatcctgatttttggcaaacaaaatgctgccagaggcaatgcggattacagcgatgtcatgcccaccagcgaggaagaaatcaaaaccactaaccctgtggccacagaggaatacggtatcgtggcagataacttgcagcagcaaaacacggctcctcaaattggaactgtcaacagccagggggccttacccggtatggtctggcagaaccgggacgtgtacctgcagggtcccatctgggccaagattcctcacacggacggcaacttccacccgtctccgctgatgggcggctttggcctgaaacatcctccgcctcagatcctgatcaagaacacgcctgtacctgcggatcctccgaccaccttcaaccagtcaaagctgaactctttcatcacgcaatacagcaccggacaggtcagcgtggaaattgaatgggagctgcagaaggaaaacagcaagcgctggaaccccgagatccagtacacctccaactactacaaatctacaagtgtggactttgctgttaatacagaaggcgtgtactctgaaccccgccccattggcacccgttacctcacccgtaatctgtaa

SEQ ID NO: 3958 - DNA, 2217 bp, Artificial Sequence
  source: /note="Description of Artificial Sequence: Synthetic polynucleotide"
atggctgccgatggttatcttccagattggctcgaggacaacctctctgagggcattcgcgagtggtgggcgctgaaacctggagccccgaagcccaaagccaaccagcaaaagcaggacgacggccggggtctggtgcttcctggctacaagtacctcggacccttcaacggactcgacaagggggagcccgtcaacgcggcggacgcggcggccctcgagcacgacaaggcctacgaccagcagctgcaggcgggtgacaatccgtacctgcggtataaccacgccgacgccgagtttcaggagcgtctgcaagaagatacgtcttttgggggcaacctcgggcgagcagtcttccaggccaagaagcgggttctcgaacctctcggtctggttgaggaaggcgctaagacggctcctggaaagaagagaccggtagagccatcaccccagcgttctccagactcctctacgggcatcggcaagaagggccaacagcccgccagaaaaagactcaattttggtcagactggcgactcagagtcagttccagaccctcaacctctcggagaacctccagcagcgccctctggtgtgggacctaatacaatggctgcaggcggtggcgcaccaatggcagacaataacgaaggcgccgacggagtgggtagttcctcgggaaattggcattgcgattccacatggctgggcgacagagtcatcaccaccagcacccgaacctgggccctgcccacctacaacaaccacctctacaagcaaatctccaacgggacatcgggaggagccaccaacgacaacacctacttcggctacagcaccccctgggggtattttgactttaacagattccactgccacttttcaccacgtgactggcagcgactcatcaacaacaactggggattccggcccaagagactcagcttcaagctcttcaacatccaggtcaaggaggtcacgcagaatgaaggcaccaagaccatcgccaataacctcaccagcaccatccaggtgtttacggactcggagtaccagctgccgtacgttctcggctctgcccaccagggctgcctgcctccgttcccggcggacgtgttcacgattccccagtacggctacctaacactcaacaacggtagtcaggccgtgggacgctcctccttctactgcctggaatactttccttcgcagatgctgggaaccggcaacaacttccagtttacttacaccttcgaggacgtgcctttccacagcagctacgcccacagccagagcttggaccggctgatgaatcctctgattgaccagtacctgtactacttgtctcggattcaaacaacaggaggcacggcaaatacgcagactctgggcttcagccaaggtgggcctaatacaatggccaatcaggcaaagaactggctgccaggaccctgttaccgccaacaacgcgtctcaacgacaaccgggcaaaacaacaatagcaactttgcctggactgctgggaccaaataccatctgaatggaagaaattcattggctaatcctggcatcgctatggcaacacacaaagacgacgaggagcgtttttttcccagtaacgggatcctgatttttggcaaacaaaatgctgccagagacaatgcggattacagcgatgtcatgcccaccagcgaggaagaaatcaaaaccactaaccctgtggccacagaggaatacggtatcgtggcagataacttgcagcagcaaaacacggctcctcaaattggaactgtcaacagccagggggccttacccggtatggtctggcagaaccgggacgtgtacctgcagggtcccatctgggccaagattcctcacacggacggcaacttccacccgtctccgctgatgggcggctttggcctgaaacatcctccgcctcagatcctgatcaagaacacgcctgtacctgcggatcctccgaccaccttcaaccagtcaaagctgaactctttcatcacgcaatacagcaccggacaggtcagcgtggaaattgaatgggagctgcagaaggaaaacagcaagcgctggaaccccgagatccagtacacctccaactactacaaatctacaagtgtggactttgctgttaatacagaaggcgtgtactctgaaccccgccccattggcacccgttacctcacccgtaatctgtaa

SEQ ID NO: 3959 - DNA, 2217 bp, Artificial Sequence
  source: /note="Description of Artificial Sequence: Synthetic polynucleotide"
atggctgccgatggttatcttccagattggctcgaggacaacctctctgagggcattcgcgagtggtgggcgctgaaacctggagccccgaagcccaaagccaaccagcaaaagcaggacgacggccggggtctggtgcttcctggctacaagtacctcggacccttcaacggactcgacaagggggagcccgtcaacgcggcggacgcggcggccctcgagcacgacaaggcctacgaccagcagctgcaggcgggtgacaatccgcacctgcggtataaccacgccgacgccgagtttcaggagcgtctgcaagaagatacgtcttttgggggcaacctcgggcgagcagtcttccaggccaagaagcgggttctcgaacctctcggtctggttgaggaaggcgctaagacggctcctggaaagaagagaccggtagagccatcaccccagcgttctccagactcctctacgggcatcggcaagaagggccaacagcccgccagaaaaagactcaattttggtcagactggcgactcagagtcagttccagaccctcaacctctcggagaacctccagcagcgccctctggtgtgggacctaatacaatggctgcaggcggtggcgcaccaatggcagacaataacgaaggcgccgacggagtgggtagttcctcgggaaattggcattgcgattccacatggctgggcgacagagtcatcaccaccagcacccgaacctgggccctgcccacctacaacaaccacctctacaagcaaatctccaacgggacatcgggaggagccaccaacgacaacacctacttcggctacagcaccccctgggggtattttgactttaacagattccactgccacttttcaccacgtgactggcagcgactcatcaacaacaactggggattccggcccaagagactcagcttcaagctcttcaacatccaggtcaaggaggtcacgcagaatgaaggcaccaagaccatcgccaataacctcaccagcaccatccaggtgtttacggactcggagtaccagctgccgtacgttctcggctctgcccaccagggctgcctgcctccgttcccggcggacgtgttcacgattccccagtacggctacctaacactcaacaacggtagtcaggccgtgggacgctcctccttctactgcctggaatactttccttcgcagatgctgagaaccggcaacaacttccagtttacttacaccttcgaggacgtgcctttccacagcagctacgcccacagccagagcttggaccggctgatgaatcctctgattgaccagtacctgtactacttgtctcggattcaaacaacaggaggcacggcaaatacgcagactctgggcttcagccaaggtgggcctaatacaatggccaatcaggcaaagaactggctgccaggaccctgttaccgccaacaacgcgtctcaacgacaaccgggcaaaacaacaatagcaactttgcctggactgctgggaccaaataccatctgaatggaagaaattcattggctaatcctggcatcgctatggcaacacacaaagacgacgaggagcgtttttttcccagtaacgggatcctgatttttggcaaacaaaatgctgccagagacaatgcggattacagcgatgtcatgcccaccagcgaggaagaaatcaaaaccactaaccctgtggccacagaggaatacggtatcgtggcagataacttgcagcagcaaaacacggctcctcaaattggaactgtcaacagccagggggccttacccggtatggtctggcagaaccgggacgtgtacctgcagggtcccatctgggccaagattcctcacacggacggcaacttccacccgtctccgctgatgggcggctttggcctgaaacatcctccgcctcagatcctgatcaagaacacgcctgtacctgcggatcctccgaccaccttcaaccagtcaaagctgaactctttcatcacgcaatacagcaccggacaggtcagcgtggaaattgaatgggagctgcagaaggaaaacagcaagcgctggaaccccgagatccagtacacctccaactactacaaatctacaagtgtggactttgctgttaatacagaaggcgtgtactctgaaccccgccccattggcacccgttacctcacccgtaatctgtaa

SEQ ID NO: 3960 - DNA, 2217 bp, Artificial Sequence
  source: /note="Description of Artificial Sequence: Synthetic polynucleotide"
atggctgccgatggttatcttccagattggctcgaggacaacctctctgagggcattcgcgagtggtgggcgctgaaacctggagccccgaagcccaaagccaaccagcaaaagcaggacgacggccggggtctggtgcttcctggctacaagtacctcggacccttcaacggactcgacaagggggagcccgtcaacgcggcggacgcggcggccctcgagcacgacaaggcctacgaccagcagctgcaggcgggtgacaatccgtacctgcggtataaccacgccgacgccgagtttcaggagcgtctgcaagaagatacgtcttttgggggcaacctcgggcgagcagtcttccaggccaagaagcgggttctcgaacctctcggtctggttgaggaaggcgctaagacggctcctggaaagaagagaccggtagagccatcaccccagcgttctccagactcctctacgggcatcggcaagaagggccaacagcccgccagaaaaagactcaattttggtcagactggcgactcagagtcagttccagaccctcaacctctcggagaacctccagcagcgccctctggtgtgggacctaatacaatggctgcaggcggtggcgcaccaatggcagacaataacgaaggcgccgacggagtgggtagttcctcgggaaattggcattgcgattccacatggctgggcgacagagtcatcaccaccagcacccgaacctgggccctgcccacctacaacaaccacctctacaagcaaatctccaacgggacatcgggaggagccaccaacgacaacacctacttcggctacagcaccccctgggggtattttgactttaacagattccactgccacttttcaccacgtgactggcagcgactcatcaacaacaactggggattccggcccaagagactcagcttcaagctcttcaacatccaggtcaaggaggtcacgcagaatgaaggcaccaagaccatcgccaataacctcaccagcaccatccaggtgtttacggactcggagtaccagctgccgtacgttctcggccctgcccaccagggctgcctgcctccgttcccggcggacgtgttcacgattccccagtacggctacctaacactcaacaacggtagtcaggccgtgggacgctcctccttctactgcctggaatactttccttcgcagatgctgagaaccggcaacaacttccagtttacttacaccttcgaggacgtgcctttccacagcagctacgcccacagccagagcttggaccggctgatgaatcctctgattgaccagtacctgtactacttgtctcggattcaaacaacaggaggcacggcaaatacgcagactctgggcttcagccaaggtgggcctaatacaatggccaatcaggcaaagaactggctgccaggaccctgttaccgccaacaacgcgtctcaacgacaaccgggcaaaacaacaatagcaactttgcctggactgctgggaccaaataccatctgaatggaagaaattcattggctaatcctggcatcgctatggcaacacacaaagacgacgaggagcgtttttttcccagtaacgggatcctgatttttggcaaacaaaatgctgccagagacaatgcggattacagcgatgtcatgcccaccagcgaggaagaaatcaaaaccactaaccctgtggccacagaggaatacggtatcgtggcagataacttgcagcagcaaaacacggctcctcaaattggaactgtcaacagccagggggccttacccggtatggtctggcagaaccgggacgtgtacctgcagggtcccatctgggccaagattcctcacacggacggcaacttccacccgtctccgctgatgggcggctttggcctgaaacatcctccgcctcagatcctgatcaagaacacgcctgtacctgcggatcctccgaccaccttcaaccagtcaaagctgaactctttcatcacgcaatacagcaccggacaggtcagcgtggaaattgaatgggagctgcagaaggaaaacagcaagcgctggaaccccgagatccagtacacctccaactactacaaatctacaagtgtggactttgctgttaatacagaaggcgtgtactctgaaccccgccccattggcacccgttacctcacccgtaatctgtaa

SEQ ID NO: 3961 - DNA, 2217 bp, Artificial Sequence
  source: /note="Description of Artificial Sequence: Synthetic polynucleotide"
atggctgccgatggttatcttccagattggctcgaggacaacctctctgagggcattcgcgagtggtgggcgctgaaacctggagccccgaagcccaaagccaaccagcaaaagcaggacgacggccggggtctggtgcttcctggctacaagtacctcggacccttcaacggactcgacaagggggagcccgtcaacgcggcggacgcggcggccctcgagcacgacaaggcctacgaccagcagctgcaggcgggtgacaatccgtacctgcggtataaccacgccgacgccgagtttcaggagcgtctgcaagaagatacgtcttttgggggcaacctcgggcgagcagtcttccaggccaagaagcgggttctcgaacctctcggtctggttggggaaggcgctaagacggctcctggaaagaagagaccggtagagccatcaccccagcgttctccagactcctctacgggcatcggcaagaagggccaacagcccgccagaaaaagactcaattttggtcagactggcgactcagagtcagttccagaccctcaacctctcggagaacctccagcagcgccctctggtgtgggacctaatacaatggctgcaggcggtggcgcaccaatggcagacaataacgaaggcgccgacggagtgggtagttcctcgggaaattggcattgcgattccacatggctgggcgacagagtcatcaccaccagcacccgaacctgggccctgcccacctacaacaaccacctctacaagcaaatctccaacgggacatcgggaggagccaccaacgacaacacctacttcggctacagcaccccctgggggtattttgactttaacagattccactgccacttttcaccacgtgactggcagcgactcatcaacaacaactggggattccggcccaagagactcagcttcaagctcttcaacatccaggtcaaggaggtcacgcagaatgaaggcaccaagaccatcgccaataacctcaccagcaccatccaggtgtttacggactcggagtaccagctgccgtacgttctcggctctgcccaccagggctgcctgcctccgttcccggcggacgtgttcacgattccccagtacggctacctaacactcaacaacggtagtcaggccgtgggacgctcctccttctactgcctggaatactttccttcgcagatgctgagaaccggcaacaacttccagtttacttacaccttcgaggacgtgcctttccacagcagctacgcccacagccagagcttggaccggctgatgaatcctctgattgaccagtacctgtactacttgtctcggattcaaacaacaggaggcacggcaaatacgcagactctgggcttcagccaaggtgggcctaatacaatggccaatcaggcaaagaactggctgccaggaccctgttaccgccaacaacgcgtctcaacgacaaccgggcaaaacaacaatagcaactttgcctggactgctgggaccaaataccatctgaatggaagaaattcattggctaatcctggcatcgctatggcaacacacaaagacgacgaggagcgtttttttcccagtaacgggatcctgatttttggcaaacaaaatgctgccagagacaatgcggattacagcgatgtcatgcccaccagcgaggaagaaatcaaaaccactaaccctgtggccacagaggaatacggtatcgtggcagataacttgcagcagcaaaacacggctcctcaaattggaactgtcaacagccagggggccttacccggtatggtctggcagaaccgggacgtgtacctgcagggtcccatctgggccaagattcctcacacggacggcaacttccacccgtctccgctgatgggcggctttggcctgaaacatcctccgcctcagatcctgatcaagaacacgcctgtacctgcggatcctccgaccaccttcaaccagtcaaagctgaactctttcatcacgcaatacagcaccggacaggtcagcgtggaaattgaatgggagctgcagaaggaaaacagcaagcgctggaaccccgagatccagtacacctccaactactacaaatctacaagtgtggactttgctgttaatacagaaggcgtgtactctgaaccccgccccattggcacccgttacctcacccgtaatctgtaa

SEQ ID NO: 3962 - DNA, 2217 bp, Artificial Sequence
  source: /note="Description of Artificial Sequence: Synthetic polynucleotide"
atggctgccgatggttatcttccagattggctcgaggacaacctctctgagggcattcgcgagtggtgggcgctgaaacctggagccccgaagcccaaagccaaccagcaaaagcaggacgacggccggggtctggtgcttcctggctacaagtacctcggacccttcaacggactcgacaagggggagcccgtcaacgcggcggacgcggcggccctcgagcacgacaaggcctacgaccagcagctgcaggcgggtgacaatccgtacctgcggtataaccacgccgacgccgagtttcaggagcgtctgcaagaagatacgtcttttgggggcaacctcgggcgagcagtcttccaggccaagaagcgggttctcgaacctctcggtctggttgaggaaggcgctaagacggctcctggaaagaagagaccggtagagccatcaccccagcgttctccagactcctctacgggcatcggcaagaagggccaacagcccgccagaaaaagactcaattttggtcagactggcgactcagagtcagttccagaccctcaacctctcggagaacctccagcagcgccctctggtgtgggacctaatacaatggctgcaggcggtggcgcaccaatggcagacaataacgaaggcgccgacggagtgggtagttcctcgggaaattggcattgcgattccacatggctgggcgacagagtcatcaccaccagcacccgaacctgggccctgcccacctacaacaaccacctctacaagcaaatctccaacgggacatcgggaggagccaccaacgacaacacctacttcggctacagcaccccctgggggtattttgactttaacagattccactgccacttttcaccacgtgactggcagcgactcatcaacaacaactggggattccggcccaagagactcagcttcaagctcttcaacatccaggtcaaggaggtcacgcagaatgaaggcaccaagaccatcgccaataacctcaccagcaccatccaggtgtttacggactcggagtaccagctgccgtacgttctcggctctgcccaccagggctgcctgcctccgttcccggcggacgtgttcacgattccccagtacggctacctaacactcaacaacggtagtcaggccgtgggacgctcctccttctactgcctggaatactttccttcgcagatgctgagaaccggcaacaacttccagtttacttacaccttcgaggacgtgcctttccacagcagctacgcccacagccagagcttggaccggctgatgaatcctctgattgaccagtacctgtactacttgtctcggattcaaacaacaggaggcacggcaaatacgcagactctgggcttcagccaaggtgggcctaatacaatggccaatcaggcaaagaactggctgccaggaccctgttaccgccaacaacgcgtctcaacgacaaccgggcaaaacaacaatagcaactttgcctggactgctgggaccaaataccatctgaatggaagaaattcattggctaatcctggcatcgctatggcaacacacaaagacgacgaggagcgtttttttcccagtaacgggatcctgatttttggcaaacaaaatgctgccagagacaatgcggattacagcgatgtcatgcccaccagcgaggaagaaatcaaaaccactaaccctgtggccacagaggaatacggtatcgtggcagataacttgcagcagcaaaacacggctcctcaaattggaactgtcaacagccagggggccttacccggtatggtctggcagaaccgggacgtgtacctgcagggtcccatctgggccaagattcctcacacggacggcaacttccacccgtctccgctgatgggcggctttggcctgaaacatcctccgcctcagatcctgatcaagaacacgcctgtacctgcggatcctccgaccaccttcaaccagtcaaagctgaactctttcatcacgcaatacagcaccggacaggtcagcgtggaaattgaatgggagctgcagaaggaaagcagcaagcgctggaaccccgagatccagtacacctccaactactacaaatctacaagtgtggactttgctgttaatacagaaggcgtgtactctgaaccccgccccattggcacccgttacctcacccgtaatctgtaa

SEQ ID NO: 3963 - DNA, 2217 bp, Artificial Sequence
  source: /note="Description of Artificial Sequence: Synthetic polynucleotide"
atggctgccgatggttatcttccagattggctcgaggacaacctctctgagggcattcgcgagtggtgggcgctgaaacctggagccccgaagcccaaagccaaccagcaaaagcaggacgacggccggggtctggtgcttcctggctacaagtacctcggacccttcaacggactcgacaagggggagcccgtcaacgcggcggacgcggcggccctcgagcacgacaaggcctacgaccagcagctgcaggcgggtgacaatccgtacctgcggtataaccacgccgacgccgagtttcaggagcgtctgcaagaagatacgtcttttgggggcaacctcgggcgagcagtcttccaggccaagaagcgggttctcgaacctctcggtctggttgaggaaggcgctaagacggctcctggaaagaagagaccggtagagccatcaccccagcgttctccagactcctctacgggcatcggcaagaagggccaacagcccgccagaaaaagactcaattttggtcagactggcgactcagagtcagttccagaccctcaacctctcggagaacctccagcagcgccctctggtgtgggacctaatacaatggctgcaggcggtggcgcaccaatggcagacaataacgaaggcgccgacggagtgggtagttcctcgggaaattggcattgcgattccacatggctgggcgacagagtcatcaccaccagcacccgaacctgggccctgcccacctacaacaaccacctctacaagcaaatctccaacgggacatcgggaggagccaccaacgacaacacctacttcggctacagcaccccctgggggtattttgactttaacagattccactgccacttttcaccacgtgactggcagcgactcatcaacaacaactggggattccggcccaagagactcagcttcaagctcttcaacatccaggtcaaggaggtcacgcagaatgaaggcaccaagaccatcgccaataacctcaccagcaccatccaggtgtttacggactcggagtaccagctgccgtacgttctcggctctgcccaccagggctgcctgcctccgttcccggcggacgtgttcacgattccccagtacggctacctaacactcaacaacggtagtcaggccgtgggacgctcctccttctactgcctggaatactttccttcgcagatgctgagaaccggcaacaacttccagtttacttacaccttcgaggacgtgcctttccacagcagctacgcccacagccagagcttggaccggctgatgaatcctctgattgaccagtacctgtactacttgtctcggattcaaacaacaggaggcacggcaaatacgcagactctgggcttcagccaaggtgggcctaatacaatggccaatcaggcaaagaactggctgccaggaccctgttaccgccaacaacgcgtctcaacgacaaccgggcaaaacaacaatagcaactttgcctggactgctgggaccaaataccatctgaatggaagaaattcattggctaatcctggcatcgctatggcaacacacaaagacgacgaggagcgtttttttcccagtaacgggatcctgatttttggcaaacaaaatgctgccagagacaatgcggattacagcgatgtcatgcccgccagcgaggaagaaatcaaaaccactaaccctgtggccacagaggaatacggtatcgtggcagataacttgcagcagcaaaacacggctcctcaaattggaactgtcaacagccagggggccttacccggtatggtctggcagaaccgggacgtgtacctgcagggtcccatctgggccaagattcctcacacggacggcaacttccacccgtctccgctgatgggcggctttggcctgaaacatcctccgcctcagatcctgatcaagaacacgcctgtacctgcggatcctccgaccaccttcaaccagtcaaagctgaactctttcatcacgcaatacagcaccggacaggtcagcgtggaaattgaatgggagctgcagaaggaaaacagcaagcgctggaaccccgagatccagtacacctccaactactacaaatctacaagtgtggactttgctgttaatacagaaggcgtgtactctgaaccccgccccattggcacccgttacctcacccgtaatctgtaa

SEQ ID NO: 3964 - DNA, 2217 bp, Artificial Sequence
  source: /note="Description of Artificial Sequence: Synthetic polynucleotide"
atggctgccgatggttatcttccagattggctcgaggacaacctctctgagggcattcgcgagtggtgggcgctgaaacctggagccccgaagcccaaagccaaccagcaaaagcaggacgacggccggggtctggtgcttcctggctacaagtacctcggacccttcaacggactcgacaagggggagcccgtcaacgcggcggacgcggcggccctcgagcacgacaaggcctacgaccagcagctgcaggcgggtgacaatccgtacctgcggtataaccacgccgacgccgagtttcaggagcgtctgcaagaagatacgtcttttgggggcaacctcgggcgagcagtcttccaggccaagaagcgggttctcgaacctctcggtctggttgaggaaggcgctaagacggctcctggaaagaagagaccggtagagccatcaccccagcgttctccagactcctctacgggcatcggcaagaagggccaacagcccgccagaaaaagactcaattttggtcagactggcgactcagagtcagttccagaccctcaacctctcggagaacctccagcagcgccctctggtgtgggacctaatacaatggctgcaggcggtggcgcaccaatggcagacaataacgaaggcgccgacggagtgggtagttcctcgggaaattggcattgcgattccacatggctgggcgacagagtcatcaccaccagcacccgaacctgggccctgcccacctacaacaaccacctctacaagcaaatctccaacgggacatcgggaggagccaccaacgacaacacctacttcggctacagcaccccctgggggtattttgactttaacagattccactgccacttttcaccacgtgactggcagcgactcatcaacaacaactggggattccggcccaagagactcagcttcaagctcttcaacatccaggtcaaggaggtcacgcagaatgaaggcaccaagaccatcgccaataacctcaccagcaccatccaggtgtttacggactcggagtaccagctgccgtacgttctcggctctgcccaccagggctgcctgcctccgttcccggcggacgtgctcacgattccccagtacggctacctaacactcaacaacggtagtcaggccgtgggacgctcctccttctactgcctggaatactttccttcgcagatgctgagaaccggcaacaacttccagtttacttacaccttcgaggacgtgcctttccacagcagctacgcccacagccagagcttggaccggctgatgaatcctctgattgaccagtacctgtactacttgtctcggattcaaacaacaggaggcacggcaaatacgcagactctgggcttcagccaaggtgggcctaatacaatggccaatcaggcaaagaactggctgccaggaccctgttaccgccaacaacgcgtctcaacgacaaccgggcaaaacaacaatagcaactttgcctggactgctgggaccaaataccatctgaatggaagaaattcattggctaatcctggcatcgctatggcaacacacaaagacgacgaggagcgtttttttcccagtaacgggatcctgatttttggcaaacaaaatgctgccagagacaatgcggattacagcgatgtcatgcccaccagcgaggaagaaatcaaaaccactaaccctgtggccacagaggaatacggtatcgtggcagataacttgcagcagcaaaacacggctcctcaaattggaactgtcaacagccagggggccttacccggtatggtctggcagaaccgggacgtgtacctgcagggtcccatctgggccaagattcctcacacggacggcaacttccacccgtctccgctgatgggcggctttggcctgaaacatcctccgcctcagatcctgatcaagaacacgcctgtacctgcggatcctccgaccaccttcaaccagtcaaagctgaactctttcatcacgcaatacagcaccggacaggtcagcgtggaaattgaatgggagctgcagaaggaaaacagcaagcgctggaaccccgagatccagtacacctccaactactacaaatctacaagtgtggactttgctgttaatacagaaggcgtgtactctgaaccccgccccattggcacccgttacctcacccgtaatctgtaa

SEQ ID NO: 3965 - DNA, 2217 bp, Artificial Sequence
  source: /note="Description of Artificial Sequence: Synthetic polynucleotide"
atggctgccgatggttatcttccagattggctcgaggacaacctctctgagggcattcgcgagtggtgggcgctgaaacctggagccccgaagcccaaagccaaccagcaaaagcaggacgacggccggggtctggtgcttcctggctacaagtacctcggacccttcaacggactcgacaagggggagcccgtcaacgcggcggacgcggcggccctcgagcacgacaaggcctacgaccagcagctgcaggcgggtgacaatccgtacctgcggtataaccacgccgacgccgagtttcaggagcgtctgcaagaagatacgtcttttgggggcaacctcgggcgagcagtcttccaggccaagaagcgggttctcgaacctctcggtctggttgaggaaggcgctaagacggctcctggaaagaagagaccggtagagccatcaccccagcgttctccagactcctctacgggcatcggcaagaagggccaacagcccgccagaaaaagactcaattttggtcagactggcgactcagagtcagttccagaccctcaacctctcggagaacctccagcagcgccctctggtgtgggacctaatacaatggctgcaggcggtggcgcaccaatggcagacaataacgaaggcgccgacggagtgggtagttcctcgggaaattggcattgcgattccacatggctgggcgacagagtcatcaccaccagcacccgaacctgggccctgcccacctacaacaaccacctctacaagcaaatctccaacgggacatcgggaggagccaccaacgacaacacctacttcggctacagcaccccctgggggtattttgactttaacagattccactgccacttttcaccacgtgactggcagcgactcatcaacaacaactggggattccggcccaagagactcagcttcaagctcttcaacatccaggtcaaggaggtcacgcagaatgaaggcaccaagaccatcgccaataacctcaccagcaccatccgggtgtttacggactcggagtaccagctgccgtacgttctcggctctgcccaccagggctgcctgcctccgttcccggcggacgtgttcacgattccccagtacggctacctaacactcaacaacggtagtcaggccgtgggacgctcctccttctactgcctggaatactttccttcgcagatgctgagaaccggcaacaacttccagtttacttacaccttcgaggacgtgcctttccacagcagctacgcccacagccagagcttggaccggctgatgaatcctctgattgaccagtacctgtactacttgtctcggattcaaacaacaggaggcacggcaaatacgcagactctgggcttcagccaaggtgggcctaatacaatggccaatcaggcaaagaactggctgccaggaccctgttaccgccaacaacgcgtctcaacgacaaccgggcaaaacaacaatagcaactttgcctggactgctgggaccaaataccatctgaatggaagaaattcattggctaatcctggcatcgctatggcaacacacaaagacgacgaggagcgtttttttcccagtaacgggatcctgatttttggcaaacaaaatgctgccagagacaatgcggattacagcgatgtcatgcccaccagcgaggaagaaatcaaaaccactaaccctgtggccacagaggaatacggtatcgtggcagataacttgcagcagcaaaacacggctcctcaaattggaactgtcaacagccagggggccttacccggtatggtctggcagaaccgggacgtgtacctgcagggtcccatctgggccaagattcctcacacggacggcaacttccacccgtctccgctgatgggcggctttggcctgaaacatcctccgcctcagatcctgatcaagaacacgcctgtacctgcggatcctccgaccaccttcaaccagtcaaagctgaactctttcatcacgcaatacagcaccggacaggtcagcgtggaaattgaatgggagctgcagaaggaaaacagcaagcgctggaaccccgagatccagtacacctccaactactacaaatctacaagtgtggactttgctgttaatacagaaggcgtgtactctgaaccccgccccattggcacccgttacctcacccgtaatctgtaa

SEQ ID NO: 3966 - DNA, 2217 bp, Artificial Sequence
  source: /note="Description of Artificial Sequence: Synthetic polynucleotide"
atggctgccgatggttatcttccagattggctcgaggacaacctctctgagggcattcgcgagtggtgggcgctgaaacctggagccccgaagcccaaagccaaccagcaaaagcaggacgacggccggggtctggtgcttcctggctacaagtacctcggacccttcaacggactcgacaagggggagcccgtcaacgcggcggacgcggcggccctcgagcacgacaaggcctacgaccagcagctgcaggcgggtgacaatccgtacctgcggtataaccacgccgacgccgagtttcaggagcgtctgcaagaagatacgtcttttgggggcaacctcgggcgagcagtcttccaggccaagaagcgggttctcgaacctctcggtctggttgaggaaggcgctaagacggctcctggaaagaagagaccggtagagccatcaccccagcgttctccagactcctctacgggcatcggcaagaagggccaacagcccgccagaaaaagactcaattttggtcagactggcgactcagagtcagttccagaccctcaacctctcggagaacctccagcagcgccctctggtgtgggacctaatacaatggctgcaggcggtggcgcaccaatggcagacaataacgaaggcgccgacggagtgggtagttcctcgggaaattggcattgcgattccacatggctgggcgacagagtcatcaccaccagcacccgaacctgggccctgcccacctacaacaaccacctctacaagcaaatctccaacgggacatcgggaggagccaccaacgacaacacctacttcggctacagcaccccctgggggtattttgactttaacagattccactgccacttttcaccacgtgactggcggcgactcatcaacaacaactggggattccggcccaagagactcagcttcaagctcttcaacatccaggtcaaggaggtcacgcagaatgaaggcaccaagaccatcgccaataacctcaccagcaccatccaggtgtttacggactcggagtaccagctgccgtacgttctcggctctgcccaccagggctgcctgcctccgttcccggcggacgtgttcacgattccccagtacggctacctaacactcaacaacggtagtcaggccgtgggacgctcctccttctactgcctggaatactttccttcgcagatgctgagaaccggcaacaacttccagtttacttacaccttcgaggacgtgcctttccacagcagctacgcccacagccagagcttggaccggctgatgaatcctctgattgaccagtacctgtactacttgtctcggattcaaacaacaggaggcacggcaaatacgcagactctgggcttcagccaaggtgggcctaatacaatggccaatcaggcaaagaactggctgccaggaccctgttaccgccaacaacgcgtctcaacgacaaccgggcaaaacaacaatagcaactttgcctggactgctgggaccaaataccatctgaatggaagaaattcattggctaatcctggcatcgctatggcaacacacaaagacgacgaggagcgtttttttcccagtaacgggatcctgatttttggcaaacaaaatgctgccagagacaatgcggattacagcgatgtcatgcccaccagcgaggaagaaatcaaaaccactaaccctgtggccacagaggaatacggtatcgtggcagataacttgcagcagcaaaacacggctcctcaaattggaactgtcaacagccagggggccttacccggtatggtctggcagaaccgggacgtgtacctgcagggtcccatctgggccaagattcctcacacggacggcaacttccacccgtctccgctgatgggcggctttggcctgaaacatcctccgcctcagatcctgatcaagaacacgcctgtacctgcggatcctccgaccaccttcaaccagtcaaagctgaactctttcatcacgcaatacagcaccggacaggtcagcgtggaaattgaatgggagctgcagaaggaaaacagcaagcgctggaaccccgagatccagtacacctccaactactacaaatctacaagtgtggactttgctgttaatacagaaggcgtgtactctgaaccccgccccattggcacccgttacctcacccgtaatctgtaa

SEQ ID NO: 3967 - DNA, 2217 bp, Artificial Sequence
  source: /note="Description of Artificial Sequence: Synthetic polynucleotide"
atggctgccgatggttatcttccagattggctcgaggacaacctctctgagggcattcgcgagtggtgggcgctgaaacctggagccccgaagcccaaagccaaccagcaaaagcaggacgacggccggggtctggtgcttcctggctacaagtacctcggacccttcaacggactcgacaagggggagcccgtcaacgcggcggacgcagcggccctcgagcacgacaaggcctacgaccagcagctgcaggcgggtgacaatccgtacctgcggtataaccacgccgacgccgagtttcaggagcgtctgcaagaagatacgtcttttgggggcaacctcgggcgagcagtcttccaggccaagaagcgggttctcgaacctctcggtctggttgaggaaggcgctaagacggctcctggaaagaagagaccggtagagccatcaccccagcgttctccagactcctctacgggcatcggcaagaaaggccaacagcccgccagaaaaagactcaattttggtcagactggcgactcagagtcagttccagaccctcaacctctcggagaacctccagcagcgccctctggtgtgggacctaatacaatggctgcaggcggtggcgcaccaatggcagacaataacgaaggcgccgacggagtgggtagttcctcgggaaattggcattgcgattccacatggctgggcgacagagtcatcaccaccagcacccgaacctgggccctgcccacctacaacaaccacctctacaagcaaatctccaacgggacatcgggaggagccaccaacgacaacacctacttcggctacagcaccccctgggggtattttgactttaacagattccactgccacttttcaccacgtgactggcagcgactcatcaacaacaactggggattccggcccaagagactcagcttcaagctcttcaacatccaggtcaaggaggtcacgcagaatgaaggcaccaagaccatcgccaataacctcaccagcaccatccaggtgtttacggactcggagtaccagctgccgtacgttctcggctctgcccaccagggctgcctgcctccgttcccggcggacgtgttcatgattccccagtacggctacctaacactcaacaacggtagtcaggccgtgggacgctcctccttctactgcctggaatactttccttcgcagatgctgagaaccggcaacaacttccagtttacttacaccttcgaggacgtgcctttccacagcagctacgcccacagccagagcttggaccggctgatgaatcctctgattgaccagtacctgtactacttgtctcggactcaaacaacaggaggcacggcaagtacgcagactctgggcttcagccaaggtgggcctaatacaatggccaatcaggcaaagaactggctgccaggaccctgttaccgccaacaacgcgtctcaacgacaaccgggcaaaacaacaatagcaactttgcctggactgctgggaccaaataccatctgaatggaagaaattcattggctaatcctggcatcgctatggcaacacacaaagacgacgaggagcgtttttttcccagtaacgggatcctgatttttggcaaacaaaatgctgccagagacaatgcggattacagcgatgtcatgctcaccagcgaggaagaaatcaaaaccactaaccctgtggctacagaggaatacggtatcgtggcagataacttgcagcagcaaaacacggctcctcaaattggaactgtcaacagccagggggccttacccggtatggtctggcagaaccgggacgtgtacctgcagggtcccatctgggccaagattcctcacacggacggcaacttccacccgtctccgctgatgggcggctttggcctgaaacatcctccgcctcagatcctgatcaagaacacgcctgtacctgcggatcctccgaccaccttcaaccagtcaaagctgaactctttcatcacgcaatacagcaccggacaggtcagcgtggaaattgaatgggagctgcagaaggaaaacagcaagcgctggaaccccgagatccagtacacctccaactactacaaatctacaagtgtggactttgctgttaatacagaaggcgtgtactctgaaccccgccccattggcacccgttacctcacccgtaatctgtaa

SEQ ID NO: 3968 - DNA, 2217 bp, Artificial Sequence
  source: /note="Description of Artificial Sequence: Synthetic polynucleotide"
atggctgccgatggttatcttccagattggctcgaggacaacctctctgagggcattcgcgagtggtgggcgctgaaacctggagccccgaagcccaaagccaaccagcaaaagcaggacgacggccggggtctggtgcttcctggctacaagtacctcggacccttcaacggactcgacaagggggagcccgtcaacgcggcggacgcagcggccctcgagcacgacaaggcctacgaccagcagctgcaggcgggtgacaatccgtacctgcggtataaccacgccgacgccgagtttcaggagcgtctgcaagaagatacgtcttttgggggcaacctcgggcgagcagtcttccaggccaagaagcgggttctcgaacctctcggtctggttgaggagggcgctaagacggctcctggaaagaagagaccggtagagccatcaccccagcgttctccagactcctctacgggcatcggcaagaaaggccaacagcccgccagaaaaagactcaattttggtcagactggcgactcagagtcagttccagaccctcaacctctcggagaacctccagcagcgccctctggtgtgggacctaatacaatggctgcaggcggtggcgcaccaatggcagacaataacgaaggcgccgacggagtgggtagttcctcgggaaattggcattgcgattccacatggctgggcgacagagtcatcaccaccagcacccgaacctgggccctgcccacctacaacaaccacctctacaagcaaatctccaacgggacatcgggaggagccaccaacgacaacacctacttcggctacagcaccccctgggggtattttgactttaacagattccactgccacttttcaccacgtgactggcagcgactcatcaacaacaactggggattccggcccaagagactcagcttcaagctcttcaacatccaggtcaaggaggtcacgcagaatgaaggcaccaagaccatcgccaataacctcaccagcaccatccaggtgtttacggactcggagtaccagctgccgtacgttctcggctctgcccaccagggctgcctgcctccgttcccggcggacgtgttcatgattccccagtacggctacctaacactcaacaacggtagtcaggccgtgggacgctcctccttctactgcctggaatactttccttcgcagatgctgagaaccggcaacaacttccagtttacttacaccttcgaggacgtgcctttccacagcagctacgcccacagccagagcttggaccggctgatgaatcctctgattgaccagtacctgtactacttgtctcggactcaaacaacaggaggcacggcaaatacgcagactctgggcttcagccaaggtgggcctaatacaatggccaatcaggcaaagaactggctgccaggaccctgttaccgccaacaacgcgtctcaacgacaaccgggcaaaacaacaatagcaactttgcctggactgctgggaccaaataccatctgaatggaagaaattcattggctaatcctggcatcgctatggcaacacacaaagacgacgaggagcgtttttttcccagtaacgggatcctgatttttggcaaacaaaatgctgccagagacaatgcggattacagcgatgtcatgctcaccagcgaggaagaaatcaaaaccactaaccctgtggctacagaggaatacggtatcgtggcagataacttgcagcagcaaaacacggctcctcaaattggaactgtcaacagccagggggccttacccggtatggtctggcagaaccgggacgtgtacctgcagggtcccatctgggccaagattcctcacacggacggcaacttccacccgtctccgctgatgggcggctttggcctgaaacatcctccgcctcagatcctgatcaagaacacgcctgtacctgcggatcctccgaccaccttcaaccagtcaaagctgaactctttcatcacgcaatacagcaccggacaggtcagcgtggaaattgaatgggagctgcagaaggaaaacagcaagcgctggaaccccgagatccagtacacctccaactactacaaatctacaagtgtggactttgctgttaatacagaaggcgtgtactctgaaccccgccccattggcacccgttacctcacccgtaatctgtaa

SEQ ID NO: 3969 - DNA, 2217 bp, Artificial Sequence
  source: /note="Description of Artificial Sequence: Synthetic polynucleotide"
atggctgccgatggttatcttccagattggctcgaggacaacctctctgagggcattcgcgagtggtgggcgctgaaacctggagccccgaagcccaaagccaaccagcaaaagcaggacgacggccggggtcaggtgcttcctggctacaagtacctcggacccttcaacggactcgacaagggggagcccgtcaacgcggcggacgcagcggccctcgagcacgacaaggcctacgaccagcagctgcaggcgggtgacaatccgtacctgcggtataaccacgccgacgccgagtttcaggagcgtctgcaagaagatacgtcttttgggggcaacctcgggcgagcagtcttccaggccaagaagcgggttctcgaacctctcggtctggttgaggaaggcgctaagacggctcctggaaagaagagaccggtagagccatcaccccagcgttctccagactcctctacgggcatcggcaagaaaggccaacagcccgccagaaaaagactcaattttggtcagactggcgactcagagtcagttccagaccctcaacctctcggagaacctccagcagcgccctctggtgtgggacctaatacaatggctgcaggcggtggcgcaccaatggcagacaataacgaaggcgccgacggagtgggtagttcctcgggaaattggcattgcgattccacatggctgggcgacagagtcatcaccaccagcacccgaacctgggccctgcccacctacaacaaccacctctacaagcaaatctccaacgggacatcgggaggagccaccaacgacaacacctacttcggctacagcaccccctgggggtattttgactttaacagattccactgccacttttcaccacgtgactggcagcgactcatcaacaacaactggggattccggcccaagagactcagcttcaagctcttcaacatccaggtcaaggaggtcacgcagaatgaaggcaccaagaccatcgccaataacctcaccagcaccatccaggtgtttacggactcggagtaccagctgccgtacgttctcggctctgcccaccagggctgcctgcctccgttcccggcggacgtgttcatgattccccagtacggctacctaacactcaacaacggtagtcaggccgtgggacgctcctccttctactgcctggaatactttccttcgcagatgctgagaaccggcaacaacttccagtttacttacaccttcgaggacgtgcctttccacagcagctacgcccacagccagagcttggaccggctgatgaatcctctgattgaccagtacctgtactacttgtctcggactcaaacaacaggaggcacggcaaatacgcagactctgggcttcagccaaggtgggcctaatacaatggccaatcaggcaaagaactggctgccaggaccctgttaccgccaacaacgcgtctcaacgacaaccgggcaaaacaacaatagcaactttgcctggactgctgggaccaaataccatctgaatggaagaaattcattggctaatcctggcatcgctatggcaacacacaaagacgacgaggagcgtttttttcccagtaacgggatcctgatttttggcaaacaaaatgctgccagagacaatgcggattacagcgatgtcatgctcaccagcgaggaagaaatcaaaaccactaaccctgtggctacagaggaatacggtatcgtggcagataacttgcagcagcaaaacacggctcctcaaattggaactgtcaacagccagggggccttacccggtatggtctggcagaaccgggacgtgtacctgcagggtcccgtctgggccaagattcctcacacggacggcaacttccacccgtctccgctgatgggcggctttggcctgaaacatcctccgcctcagatcctgatcaagaacacgcctgtacctgcggatcctccgaccaccttcaaccagtcaaagctgaactctttcatcacgcaatacagcaccggacaggtcagcgtggaaattgaatgggagctgcagaaggaaaacagcaagcgctggaaccccgagatccagtacacctccaactactacaaatctacaagtgtggactttgctgttaatacagaaggcgtgtactctgaaccccgccccattggcacccgttacctcacccgtaatctgtaa

SEQ ID NO: 3970 - DNA, 2217 bp, Artificial Sequence
  source: /note="Description of Artificial Sequence: Synthetic polynucleotide"
atggctgccgatggttatcttccagattggctcgaggacaacctctctgagggcattcgcgagtggtgggcgctgaaacctggagccccgaagcccaaagccaaccagcaaaagcaggacgacggccggggtctggtgcttcctggctacaagtacctcggacccttcaacggactcgacaagggggagcccgtcaacgcggcggacgcagcggccctcgagcacgacaaggcctacgaccagcagctgcaggcgggtgacaatccgtacctgcggtataaccacgccgacgccgagtttcaggagcgtctgcaagaagatacgtcttttgggggcaacctcgggcgagcagtcttccaggccaagaagcgggttctcgaacctctcggtctggttgaggaaggcgctaagacggctcctggaaagaagagaccggtagagccatcaccccagcgttctccagactcctctacgggcatcggcaagaaaggccaacagcccgccagaaaaagactcaattttggtcagactggcgactcagagtcagttccagaccctcaacctctcggagaacctccagcagcgccctctggtgtgggacctaatacaatggctgcaggcggtggcgcaccaatggcagacaataacgaaggcgccgacggagtgggtagttcctcgggaaattggcattgcgattccacatggctgggcgacagagtcatcaccaccagcacccgaacctgggccctgcccacctacaacaaccacctctacaagcaaatctccaacgggacatcgggaggagccaccaacgacaacacctacttcggctacagcaccccctgggggtattttgactttaacagattccactgccacttttcaccacgtgactggcagcgactcatcaacagcaactggggattccggcccaagagactcagcttcaagctcttcaacatccaggtcaaggaggtcacgcagaatgaaggcaccaagaccatcgccaataacctcaccagcaccatccaggtgtttacggactcggagtaccagctgccgtacgttctcggctctgcccaccagggctgcctgcctccgttcccggcggacgtgttcatgattccccagtacggctacctaacactcaacaacggtagtcaggccgtgggacgctcctccttctactgcctggaatactttccttcgcagatgctgagaaccggcaacaacttccagtttacttacaccttcgaggacgtgcctttccacagcagctacgcccacagccagagcttggaccggctgatgaatcctctgattgaccagtacctgtactacttgtctcggactcaaacaacaggaggcacggcaaatacgcagactctgggcttcagccaaggtgggcctaatacaatggccaatcaggcaaagaactggctgccaggaccctgttaccgccaacaacgcgtctcaacgacaaccgggcaaaacaacaatagcaactttgcctggactgctgggaccaaataccatctgaatggaagaaattcattggctaatcctggcatcgctatggcaacacacaaagacgacgaggagcgtttttttcccagtaacgggatcctgatttttggcaaacaaaatgctgccagagacaatgcggattacagcgatgtcatgctcaccagcgaggaagaaatcaaaaccactaaccctgtggctacagaggaatacggtatcgtggcagataacttgcagcagcaaaacacggctcctcaaattggaactgtcaacagccagggggccttacccggtatggtctggcagaaccgggacgtgtacctgcagggtcccatctgggccaagattcctcacacggacggcaacttccacccgtctccgctgatgggcggctttggcctgaaacatcctccgcctcagatcctgatcaagaacacgcctgtacctgcggatcctccgaccaccttcaaccagtcaaagctgaactctttcatcacgcaatacagcaccggacaggtcagcgtggaaattgaatgggagctgcagaaggaaaacagcaagcgctggaaccccgagatccagtacacctccaactactacaaatctacaagtgtggactttgctgttaatacagaaggcgtgtactctgaaccccgccccattggcacccgttacctcacccgtaatctgtaa

SEQ ID NO: 3971 - DNA, 2217 bp, Artificial Sequence
  source: /note="Description of Artificial Sequence: Synthetic polynucleotide"
atggctgccgatggttatcttccagattggctcgaggacaacctctctgagggcattcgcgagtggtgggcgctgaaacctggagccccgaagcccaaagccaaccagcaaaagcaggacgacggccggggtctggtgcttcctggctacaagtacctcggacccttcaacggactcgacaagggggagcccgtcaacgcggcggacgcagcggccctcgagcacgacaaggcctacgaccagcagctgcaggcgggtgacaatccgtacctgcggtataaccacgccgacgccgagtttcaggagcgtctgcaagaagatacgtcttttgggggcaacctcgggcgagcagtcttccaggccaagaagcgggttctcgaacctctcggtctggttgaggagggcgctaagacggctcctggaaagaagagaccggtagagccatcaccccagcgttctccagactcctctacgggcatcggcaagaaaggccaacagcccgccagaaaaagactcaattttggtcagactggcgactcagagtcagttccagaccctcaacctctcggagaacctccagcagcgccctctggtgtgggacctaatacaatggctgcaggcggtggcgcaccaatggcagacaataacgaaggcgccgacggagtgggtagttcctcgggaaattggcattgcgattccacatggctgggcgacagagtcatcaccaccagcacccgaacctgggccctgcccacctacaacaaccacctctacaagcaaatctccaacgggacatcgggaggagccaccaacgacaacacctacttcggctacagcaccccctgggggtattttgactttaacagattccactgccacttttcaccacgtgactggcagcgactcatcaacaacaactggggattccggcccaagagactcagcttcaagctcttcaacatccaggtcaaggaggtcacgcagaatgaaggcaccaagaccatcgccaataacctcaccagcaccatccaggtgtttacggactcggagtaccagctgccgtacgttctcggctctgcccaccagggctgcctgcctccgttcccggcggacgtgttcacgattccccagtacggctacctaacactcaacaacggtagtcaggccgtgggacgctcctccttctactgcctggaatactttccttcgcagatgctgagaaccggcaacaacttccagtttacttacaccttcgaggacgtgcctttccacagcagctacgcccacagccagagcttggaccggctgatgaatcctctgattgaccagtacctgtactacttgtctcggactcaaacaacaggaggcacggcaaatacgcagactctgggcttcagccaaggtgggcctaatacaatggccaatcaggcaaagaactggctgccaggaccctgttaccgccaacaacgcgtctcaacgacaaccgggcaaaacaacaatagcaactttgcctggactgctgggaccaaataccatctgaatggaagaaattcattggctaatcctggcatcgctatggcaacacacaaagacgacgaggagcgtttttttcccagtaacgggatcctgatttttggcaaacaaaatgctgccagagacaatgcggattacagcgatgtcatgctcaccagcgaggaagaaatcaaaaccactaaccctgtggctacagaggaatacggtatcgtggcagataacttgcagcagcaaaacacggctcctcaaattggaactgtcaacagccagggggccttacccggtatggtctggcagaaccgggacgtgtacctgcagggtcccatctgggccaagattcctcacacggacggcaacttccacccgtctccgctgatgggcggctttggcctgaaacatcctccgcctcagatcctgatcaagaacacgcctgtacctgcggatcctccgaccaccttcaaccagtcaaagctgaactctttcatcacgcaatacagcaccggacaggtcagcgtggaaattgaatgggagctgcagaaggaaaacagcaagcgctggaaccccgagatccagtacacctccaactactacaaatctacaagtgtggactttgctgttaatacagaaggcgtgtactctgaaccccgccccattggcacccgttacctcacccgtaatctgtaa

SEQ ID NO: 3972 - DNA, 2217 bp, Artificial Sequence
  source: /note="Description of Artificial Sequence: Synthetic polynucleotide"
atggctgccgatggttatcttccagattggctcgaggacaacctctctgagggcattcgcgagtggtgggcgctgaaacctggagccccgaagcccaaagccaaccagcaaaagcaggacgacggccggggtctggtgcttcctggctacaagtacctcggacccttcaacggactcgacaagggggagcccgtcaacgcggcggacgcagcggccctcgagcacgacaaggcctacgaccagcagctgcaggcgggtgacaatccgtacctgcggtataaccacgccgacgccgagtttcaggagcgtctgcaagaagatacgtcttttgggggcaacctcgggcgagcagtcttccaggccaagaagcgggttctcgaacctctcggtctggttgaggaaggcgctaagacggctcctggaaagaagagaccggtagagccatcaccccagcgttctccagactcctctacgggcatcggcaagaaaggccaacagcccgccagaaaaagactcaattttggtcagactggcgactcagagtcagttccagaccctcaacctctcggagaacctccagcagcgccctctggtgtgggacctaatacaatggctgcaggcggtggcgcaccaatggcagacaataacgaaggcgccgacggagtgggtagttcctcgggaaattggcattgcgattccacatggctgggcgacagagtcatcaccaccagcacccgaacctgggccctgcccacctacaacaaccacctctacaagcaaatctccaacgggacatcgggaggagccaccaacgacaacacctacttcggctacagcaccccctgggggtattttgactttaacagattccactgccacttttcaccacgtgactggcagcgactcatcgacaacaactggggattccggcccaagagactcagcttcaagctcttcaacatccaggtcaaggaggtcacgcagaatgaaggcaccaagaccatcgccaataacctcaccagcaccatccaggtgtttacggactcggagtaccagctgccgtacgttctcggctctgcccaccagggctgcctgcctccgttcccggcggacgtgttcatgattccccagtacggctacctaacactcaacaacggtagtcaggccgtgggacgctcctccttctactgcctggaatactttccttcgcagatgctgagaaccggcaacaacttccagtttacttacaccttcgaggacgtgcctttccacagcagctacgcccacagccagagcttggaccggctgatgaatcctctgattgaccagtacctgtactacttgtctcggactcaaacaacaggaggcacggcaaatacgcagactctgggcttcagccaaggtgggcctaatacaatggccaatcaggcaaagaactggctgccaggaccctgttaccgccaacaacgcgtctcaacgacaaccgggcaaaacaacaatagcaactttgcctggactgctgggaccaaataccatctgaatggaagaaattcattggctaatcctggcatcgctatggcaacacacaaagacgacgaggagcgtttttttcccagtaacgggatcctgatttttggcaaacaaaatgctgccagagacaatgcggattacagcgatgtcatgctcaccagcgaggaagaaatcaaaaccactaaccctgtggctacagaggaatacggtatcgtggcagataacttgcagcagcaaaacacggctcctcaaattggaactgtcaacagccagggggccttacccggtatggtctggcagaaccgggacgtgtacctgcagggtcccatctgggccaagattcctcacacggacggcaacttccacccgtctccgctgatgggcggctttggcctgaaacatcctccgcctcagatcctgatcaagaacacgcctgtacctgcggatcctccgaccaccttcaaccagtcaaagctgaactctttcatcacgcaatacagcaccggacaggtcagcgtggaaattgaatgggagctgcagaaggaaaacagcaagcgctggaaccccgagatccagtacacctccaactactacaaatctacaagtgtggactttgctgttaatacagaaggcgtgtactctgaaccccgccccattggcacccgttacctcacccgtaatctgtaa

SEQ ID NO: 3973 - DNA, 2217 bp, Artificial Sequence
  source: /note="Description of Artificial Sequence: Synthetic polynucleotide"
atggctgccgatggttatcttccagattggctcgaggacaacctctctgagggcattcgcgagtggtgggcgctgaaacctggagccccgaagcccaaagccaaccagcaaaagcaggacgacggccggggtctggtgcttcctggctacaagtacctcggacccttcaacggactcgacaagggggagcccgtcaacgcggcggacgcagcggccctcgagcacgacaaggcctacgaccagcagctgcaggcgggtgacaatccgtacctgcggtataaccacgccgacgccgagtttcaggagcgtctgcaagaagatacgtcttttgggggcaacctcgggcgagcagtcttccaggccaagaagcgggttctcgaacctctcggtctggttgaggaaggcgctaagacggctcctggaaagaagagaccggtagagccatcaccccagcgttctccagactcctctacgggcatcggcaagaaaggccaacagcccgccagaaaaagactcaattttggtcagactggcgactcagagtcagttccagaccctcaacctctcggagaacctccagcagcgccctctggtgtgggacctaatacaatggctgcaggcggtggcgcaccaatggcagacaataacgaaggcgccgacggagtgggtagttcctcgggaaattggcattgcgattccacatggctgggcgacagagtcatcaccaccagcacccgaacctgggccctgcccgcctacaacaaccacctctacaagcaaatctccaacgggacatcgggaggagccaccaacgacaacacctacttcggctacagcaccccctgggggtattttgactttaacagattccactgccacttttcaccacgtgactggcagcgactcatcaacaacaactggggattccggcccaagagactcagcttcaagctcttcaacatccaggtcaaggaggtcacgcagaatgaaggcaccaagaccatcgccaataacctcaccagcaccatccaggtgtttacggactcggagtaccagctgccgtacgttctcggctctgcccaccagggctgcctgcctccgttcccggcggacgtgttcacgattccccagtacggctacctaacactcaacaacggtagtcaggccgtgggacgctcctccttctactgcctggaatactttccttcgcagatgctgagaaccggcaacaacttccagtttacttacaccttcgaggacgtgcctttccacagcagctacgcccacagccagagcttggaccggctgatgaatcctctgattgaccagtacctgtactacttgtctcggactcaaacaacaggaggcacggcaaatacgcagactctgggcttcagccaaggtgggcctaatacaatggccaatcaggcaaagaactggctgccaggaccctgttaccgccaacaacgcgtctcaacgacaaccgggcaaaacaacaatagcaactttgcctggactgctgggaccaaataccatctgaatggaagaaattcattggctaatcctggcatcgctatggcaacacacaaagacgacgaggagcgtttttttcccagtaacgggatcctgatttttggcaaacaaaatgctgccagagacaatgcggattacagcgatgtcatgctcaccagcgaggaagaaatcaaaaccactaaccctgtggctacagaggaatacggtatcgtggcagataacttgcagcagcaaaacacggctcctcaaattggaactgtcaacagccagggggccttacccggtatggtctggcagaaccgggacgtgtacctgcagggtcccatctgggccaagattccacacacggacggcaacttccacccgtctccgctgatgggcggctttggcctgaaacatcctccgcctcagatcctgatcaagaacacgcctgtacctgcggatcctccgaccaccttcaaccagtcaaagctgaactctttcatcacgcaatacagcaccggacaggtcagcgtggaaattgaatgggagctgcagaaggaaaacagcaagcgctggaaccccgagatccagtacacctccaactactacaaatctacaaatgtggactttgctgttaatacagaaggcgtgtactctgaaccccgccccattggcacccgttacctcacccgtaatctgtaa

SEQ ID NO: 3974 - DNA, 2217 bp, Artificial Sequence
  source: /note="Description of Artificial Sequence: Synthetic polynucleotide"
atggctgccgatggttatcttccagattggctcgaggacaacctctctgagggcattcgcgagtggtgggcgctgaaacctggagccccgaagcccaaagccaaccagcaaaagcaggacgacggccggggtctggtgcttcctggctacaagtacctcggacccttcaacggactcgacaagggggagcccgtcaacgcggcggacgcagcggccctcgagcacgacaaggcctacgaccagcagctgcaggcgggtgacaatccgtacctgcggtataaccacgccgacgccgagtttcaggagcgtctgcaagaagatacgtcttttgggggcaacctcgggcgagcagtcttccaggccaagaagcgggttctcgaacctctcggtctggttgaggaaggcgctaagacggctcctggaaagaagagaccggtagagccatcaccccagcgttctccagactcctctacgggcatcggcaagaaaggccaacagcccgccagaaaaagactcaattttggtcagactggcgactcagagtcagttccagaccctcaacctctcggagaacctccagcagcgccctctggtgtgggacctaatacaatggctgcaggcggtggcgcaccaatggcagacaataacgaaggcgccgacggagtgggtagttcctcgggaaattggcattgcgattccacatggctgggcgacagagtcatcaccaccagcacccgaacctgggccctgcccacctacaacaaccacctctacaagcaaatctccaacgggacatcgggaggagccaccaacgacaacacctacttcggctacagcaccccctgggggtattttgactttaacagattccactgccacttttcaccacgtgactggcagcgactcatcaacaacaactggggattccggcccaagagactcagcttcaagctcttcaacatccaggtcaaggaggtcacgcagaatgaaggcaccaagaccatcgccaataacctcaccagcaccatccaggtgtttacggactcggagtaccagctgccgtacgttctcggctctgcccaccagggctgcctgcctccgttcccggcggacgtgttcatgattccccagtacggctacctaacactcaacgacggtagtcaggccgtgggacgctcctccttctactgcctggaatactttccttcgcagatgctgagaaccggcaacaacttccagtttacttacaccttcgaggacgtgcctttccacagcagctacgcccacagccagagcttggaccggctgatgaatcctctgattgaccagtacctgtactacttgtctcggactcaaacaacaggaggcacggcaaatacgcagactctgggcttcagccaaggtgggcctaatacaatggccaatcaggcaaagaactggctgccaggaccctgttaccgccaacaacgcgtctcaacgacaaccgggcaaaacaacaatagcaactttgcctggactgctgggaccaaataccatctgaatggaagaaattcattggctaatcctggcatcgctatggcaacacacaaagacgacgaggagcgtttttttcccagtaacgggatcctgatttttggcaaacaaaatgctgccagagacaatgcggattacagcgatgtcatgctcaccagcgaggaagaaatcaaaaccactaaccctgtggctacagaggaatacggtatcgtggcagataacttgcagcagcaaaacacggctcctcaaattggaactgtcaacagccagggggccttacccggtatggtctggcagaaccgggacgtgtacctgcagggtcccatctgggccaagattcctcacacggacggcaacttccacccgtctccgctgatgggcggctttggcctgaaacatcctccgcctcagatcctgatcaagaacacgcctgtacctgcggatcctccgaccaccttcaaccagtcaaagctgaactctttcatcacgcaatacagcaccggacaggtcagcgtggaaattgaatgggagctgcagaaggaaaacagcaagcgctggaaccccgagatccagtacacctccaactactacaaatctacaagtgtggactttgctgttaatacagaaggcgtgtactctgaaccccgccccattggcacccgttacctcacccgtaatctgtaa

SEQ ID NO: 3975 - DNA, 2217 bp, Artificial Sequence
  source: /note="Description of Artificial Sequence: Synthetic polynucleotide"
atggctgccgatggttatcttccagattggctcgaggacaacctctctgagggcattcgcgagtggtgggcgctgaaacctggagccccgaagcccaaagccaaccagcaaaagcaggacgacggccggggtctggtgcttcctggctacaagtacctcggacccttcaacggactcgacaagggggagcccgtcaacgcggcggacgcagcggccctcgagcacgacaaggcctacgaccagcagctgcaggcgggtgacaatccgtacctgcggtataaccacgccgacgccgagtttcaggagcgtctgcaagaagatacgtcttttgggggcaacctcgggcgagcagtcttccaggccaagaagcgggttctcgaacctctcggtctggttgaggaaggcgctaagacggctcctggaaagaagagaccggtagagccatcaccccagcgttctccagactcctctacgggcatcggcaagaaaggccaacagcccgccagaaaaagactcaattttggtcagactggcgactcagagtcagttccagaccctcaacctctcggagaacctccagcagcgccctctggtgtgggacctaatacaatggctgcaggcggtggcgcaccaatggcagacaataacgaaggcgccgacggagtgggtagttcctcgggaaattggcattgcgattccacatggctgggcgacagagtcatcaccaccagcacccgaacctgggcccagcccacctacaacaaccacctctacaagcaaatctccaacgggacatcgggaggagccaccaacgacaacacctacttcggctacagcaccccctgggggtattttgactttaacagattccactgccacttttcaccacgtgactggcagcgactcatcaacaacaactggggattccggcccaagagactcagcttcaagctcttcaacatccaggtcaaggaggtcacgcagaatgaaggcaccaagaccatcgccaataacctcaccagcaccatccaggtgtttacggactcggagtaccagctgccgtacgttctcggctctgcccaccagggctgcctgcctccgttcccggcggacgtgttcatgattccccagtacggctacctaacactcaacaacggtagtcaggccgtgggacgctcctccttctactgcctggaatactttccttcgcagatgctgagaaccggcaacaacttccagtttacttacaccttcgaggacgtgcctttccacagcagctacgcccacagccagagcttggaccggctgatgaatcctctgattgaccagtacctgtactacttgtctcggactcaaacaacaggaggcacggcaaatacgcagactctgggcttcagccaaggtgggcctaatacaatggccaatcaggcaaagaactggctgccaggaccctgttaccgccaacaacgcgtctcaacgacaaccgggcaaaacaacaatagcaactttgcctggactgctgggaccaaataccatctgaatggaagaaattcattggctaatcctggcatcgctatggcaacacacaaagacgacgaggagcgtttttttcccagtaacgggatcctgatttttggcaaacaaaatgctgccagagacaatgcggattacagcgatgtcatgctcaccagcgaggaagaaatcaaaaccactaaccctgtggctacagaggaatacggtatcgtggcagataacttgcagcagcaaaacacggctcctcaaattggaactgtcaacagccagggggccttacccggtatggtctggcagaaccgggacgtgtacctgcagggtcccatctgggccaagattcctcacacggacggcaacttccacccgtctccgctgatgggcggctttggcctgaaacatcctccgcctcagatcctgatcaagaacacgcctgtacctgcggatcctccgaccaccttcaaccagtcaaagctgaactctttcatcacgcaatacagcaccggacaggtcagcgtggaaattgaatgggagctgcagaaggaaaacagcaagcgctggaaccccgagatccagtacacctccaactactacaaatctacaagtgtggactttgctgttaatacagaaggcgtgtactctgaaccccgccccattggcacccgttacctcacccgtaatctgtaa

SEQ ID NO: 3976 - DNA, 2208 bp, Artificial Sequence
  source: /note="Description of Artificial Sequence: Synthetic polynucleotide"
atggctgccgatggttatcttccagattggctcgaggacactctctctgaaggaataagacagtggtggaagctcaaacctggcccaccaccgccaaagcccgcagagcggcataaggacgacagcaggggtcttgtgcttcctgggtacaagtacctcggacccttcaacggactcgacaaaggagagccggtcaacgaggcagacgccgcggccctcgagcacgacaaggcctacgaccggcagctcgacagcggagacaacccgtacctcaagtacaaccacgccgacgcggagtttcaggagcgccttaaagaagatacgtcttttgggggcaacctcggacgagcagtcttccaggcgaaaaagagggttcttgaacctctgggcctggttgaggaacctgttaagacggctccgggaaaaaagaggccggtagagcactctcctgcggagccagactcctcctcgggaaccggaaaggcgggccagcagcctgcgagaaagagattgaatttcggtcagactggagacgcagactccgtacctgacccccagcctctcggacagccaccagcagccccctctggtctgggaactaatacgatggctacaggcagtggcgcaccaatggcagacaataacgagggcgccgacggagtgggtaattcctcgggaaattggcattgcgattccacatggatgggcgacagagtcatcaccaccagcacccgcacctgggctctgcccacctacaacaaccatctgtacaagcaaatttccagccaatcaggagcatcgaacgacaaccactactttggctacagcaccccctgggggtattttgacttcaacagattccactgccacttttcgccacgtgactggcaaagactcatcaacaacaactggggattccggcccaagagactcagcttcaagctctttaacattcaagtcaaggaggtcacgcagaatgacggtacgacgacgattgccaataaccttaccagcacggttcaggtctttactgactcggagtaccagctcccgtacgtcctcggctcggcgcatcaaggatgcctcccgccgtttccagcggacgtcttcatggtcccacagtatggatacctcaccctgaacaacgggagtcaggcggtaggacgctcttccttttactgcctggagtactttccttctcagatgcttcgtactggaaacaactttaccttcagctacacctttgaagacgttcctttccacagcagctacgctcacagccaaagtctggaccgtctcatgaatcctctcatcgaccagtacctgtattacttgagcaaaacaaacgctccaagcggaaccaccacgatgtccaggcttcagttttctcaggccggagcaagtgacattcgggaccagtctagaaactggcttcctggaccctgttaccgccagcagcgagtatcaaagacagctgcggacaacaacaacagtgattactcgtggactggagctaccaagtaccacctcaatggaagagactctctggtgaacccgggcccagctatggccagccacaaggacgatgaagaaaaatattttcctcagagcggggttctcatcttcgggaaacaaggctcaaataaaactaatgtggacattgaaaaggtcatgattacagacgaagaggaaatcaggaccaccaatcccgtggctacggagcagtacggtgctgtatctaccaaccttcaaagcggcaacacacaagcagctacctcagatgtcaacacacaaggcgttcttcctggcatggtctggcaggacagagacgtgtacctgcaggggcccatctgggcaaagattccccacacggatggacactttcacccttctcctcttatgggaggatttggattgaagcaccctcccccacagattctcatcaagaataccccggtacctgcgaatccttctaccaccttcagtgcggcaaagtttgcttctttcatcacacagtactccacagggcaggtcagcgtggagatcgagtgggagctgcagaaagagaacagcaaacgctggaaccccgagattcagtatacctccaactacaacaagtctgttaatgtggactttactgtggacactaatggcgtgtattcagagcctcgccccattggcacaagatacctgactcgtaatctgtaa

SEQ ID NO: 3977 - DNA, 2208 bp, Artificial Sequence
  source: /note="Description of Artificial Sequence: Synthetic polynucleotide"
atggctgccgatggttatcttccagattggctcgaggacactctctctgaaggaataagacagtggtggaagctcaaacctggcccaccaccgccaaagcccgcagagcggcataaggacgacagcaggggtcttgtgcttcctgggtacaagtacctcggacccttcaacggactcgacaaaggagagccggtcaacgaggcagacgccgcggccctcgagcacgacaaggcctacgaccggcagctcgacagcggagacaacccgtacctcaagtacaaccacgccgacgcggagtttcaggagcgccttaaagaagatacgtcttttgggggcaacctcggacgagcagtcttccaggcgaaaaagagggttcttgaacctctgggcctggttgaggaacctgttaagacggctccgggaaaaaagaggccggtagagcactctcctgcggagccagactcctcctcgggaaccggaaaggcgggccagcagcctgcgagaaagagattgaatttcggtcagactggagacgcagactccgtacctgacccccagcctctcggacagccaccagcagccccctctggtctgggaactaatacgatggctacaggcagtggcgcaccaatggcagacaataacgagggcgccgacggagtgggtaattcctcgggaaattggcattgcgattccacatggatgggcgacagagtcatcaccaccagcacccgcacctgggctctgcccacctacaacaaccatctgtacaagcaaatttccagccaatcaggagcatcgaacgacaaccactactttggctacagcaccccctgggggtattttgacttcaacagattccactgccacttttcgccacgtgactggcaaagactcatcaacaacaactggggattccggcccaagagactcagcttcaagctctttaacattcaagtcaaggaggtcacgcagaatgacggtacgacgacgattgccaataaccttaccagcacggttcaggtctttactgactcggagtaccagctcccgtacgtcctcggctcggcgcatcaaggatgcctcccgccgtttccagcggacgtcttcatggtcccacagtatggatacctcaccctgaacaacgggagtcaggcggtaggacgctcttccttttactgcctggagtactttccttctcagatgcttcgtactggaaacaactttaccttcagctacacctttgaagacgttcctttccacagcagctacgctcacagccaaagtctggaccgtctcatgaatcctctcatcgaccagtacctgtattacttgagcaaaacaaacgctccaagcggaaccaccacgatgtccaggcttcagttttctcaggccggagcaagtgacattcgggaccagtctagaaactggcttcctggaccctgttaccgccagcagcgagtatcaaagacagctgcggacaacaacaacagtgattactcgtggactggagctaccaagtaccacctcaatggaagagactctctggtgaacccgggcccagctatggccagccacaaggacgatgaagaaaaaatatttcctcagagcggggttctcatcttcgggaaacaaggctcaaataaaactaatgtggacattgaaaaggtcatgattacagacgaagaggaaatcaggaccaccaatcccgtggctacggagcagtacggtgctgtatctaccaaccttcaaagcggcaacacacaagcagctacctcagatgtcaacacacaaggcgttcttcctggcatggtctggcaggacagagacgtgtacctgcaggggcccatctgggcaaagattccccacacggatggacactttcacccttctcctcttatgggaggatttggattgaagcaccctcccccacagattctcatcaagaataccccggtacctgcgaatccttctaccaccttcagtgcggcaaagtttgcttctttcatcacacagtactccacagggcaggtcagcgtggagatcgagtgggagctgcagaaagagaacagcaaacgctggaaccccgagattcagtatacctccaactacaacaagtctgttaatgtggactttactgtggacactaatggcgtgtattcagagcctcgccccattggcacaagatacctgactcgtaatctgtaa

SEQ ID NO: 3978 - DNA, 2208 bp, Artificial Sequence
  source: /note="Description of Artificial Sequence: Synthetic polynucleotide"
atggctgccgatggttatcttccagattggctcgaggacactctctctgaaggaataagacagtggtggaagctcaaacctggcccaccaccgccaaagcccgcagagcggcataaggacgacagcaggggtcttgtgcttcctgggtacaagtacctcggacccttcaacggactcgacaaaggagagccggtcaacgaggcagacgccgcggccctcgagcacgacaaggcctacgaccggcagctcgacagcggagacaacccgtacctcaagtacaaccacgccgacgcggagtttcaggagcgccttaaagaagatacgtcttttgggggcaacctcggacgagcagtcttccaggcgaaaaagagggttcttgaacctctgggcctggttgaggaacctgttaagacggctccgggaaaaaagaggccggtagagcactctcctgcggagccagactcctcctcgggaaccggaaaggcgggccagcagcctgcgagaaagagattgaatttcggtcagactggagacgcagactccgtacctgacccccagcctctcggacagccaccagcagccccctctggtctgggaactaatacgatggctacaggcagtggcgcaccaatggcagacaataacgagggcgccgacggagtgggtaattcctcgggaaattggcattgcgattccacatggatgggcgacagagtcatcaccaccagcacccgcacctgggctctgcccacctacaacaaccatctgtacaagcaaatttccagccaatcaggagcatcgaacgacaaccactactttggctacagcaccccctgggggtattttgacttcaacagattccactgccacttttcgccacgtgactggcaaagactcatcaacaacaactggggattccggcccaagagactcagcttcaagctctttaacattcaagtcaaggaggtcacgcagaatgacggtacgacgacgattgccaataaccttaccagcacggttcaggtctttactgactcggagtaccagctcccgtacgccctcggctcggcgcatcaaggatgcctcccgccgtttccagcggacgtcttcatggtcccacagtatggatacctcaccctgaacaacgggagtcaggcggtaggacgctcttccttttactgcctggagtactttccttctcagatgcttcgtactggaaacaactttaccttcagctacacctttgaagacgttcctttccacagcagctacgctcacagccaaagtctggaccgtctcatgaatcctctcatcgaccagtacctgtattacttgagcaaaacaaacgctccaagcggaaccaccacgatgtccaggcttcagttttctcaggccggagcaagtgacattcgggaccagtctagaaactggcttcctggaccctgttaccgccagcagcgagtatcaaagacagctgcggacaacaacaacagtgattactcgtggactggagctaccaagtaccaccccaatggaagagactctctggtgaacccgggcccagctatggccagccacaaggacgatgaagaaaaatattttcctcagagcggggttctcatcttcgggaaacaaggctcaaataaaactaatgtggacattgaaaaggtcatgattacagacgaagaggaaatcaggaccaccaatcccgtggctacggagcagtacggtgctgtatctaccaaccttcaaagcggcaacacacaagcagctacctcagatgtcaacacacaaggcgttcttcctggcatggtctggcaggacagagacgtgtacctgcaggggcccatctgggcaaagattccccacacggatggacactctcacccttctcctcttatgggaggatttggattgaagcaccctcccccacagattctcatcaagaataccccggtacctgcgaatccttctaccaccttcagtgcggcaaagtttgcttctttcatcacacagtactccacagggcaggtcagcgtggagatcgagtgggagctgcagaaagagaacagcaaacgctggaaccccgagattcagtatacctccaactacaacaagtctgttaatgtggactttactgtggacactaatggcgtgtattcagagcctcgccccattggcacaagatacctgactcgtaatctgtaa

SEQ ID NO: 3979 - DNA, 2205 bp, Artificial Sequence
  source: /note="Description of Artificial Sequence: Synthetic polynucleotide"
atggctgccgatggttatcttccagattggctcgaggacactctctctgaaggaataagacagtggtggaagctcaaacctggcccaccaccgccaaagcccgcagagcggcataaggacgacagcaggggtcttgtgcttcctgggtacaagtacctcggacccttcaacggactcgacaaaggagagccggtcaacgaggcagacgccgcggccctcgagcacgacaaggcctacgaccggcagctcgacagcggagacaacccgtacctcaagtacaaccacgccgacgcggagtttcaggagcgccttaaagaagatacgtcttttgggggcaacctcggacgagcagtcttccaggcgaaaaagagggttcttgaacctctgggcctggttgaggaacctgttaagacggctccgggaaaaaagaggccggtagagcactctcctgcggagccagactcctcctcgggaaccggaaaggcgggccagcagcctgcgagaaagagattgaatttcggtcagactggagacgcagactccgtacctgacccccagcctctcggacagccaccagcagccccctctggtctgggaactaatacgatggctacaggcagtggcgcaccaatggcagacaataacgagggcgccgacggagtgggtaattcctcgggaaattggcattgcgattccacatggatgggcgacagagtcatcaccaccagcacccgcacctgggctctgcccacctacaacaaccatctgtacaagcaaatttccagccaatcaggagcatcgaacgacaaccactactttggctacagcaccccctgggggtattttgacttcaacagattccactgccacttttcgccacgtgactggcaaagactcatcaacaacaactggggattccggcccaagagactcagcttcaagctctttaacattcaagtcaaggaggtcacgcagaatgacggtacgacgacgattgccaataaccttaccagcacggttcaggtctttactgactcggagtaccagctcccgtacgtcctcggctcggcgcatcaaggatgcctcccgccgtttccagcggacgtcttcatggtcccacagtatggatacctcaccctgaacaacgggagtcaggcggtaggacgctcttccttttactgcctggagtactttccttctcagatgcttcgtactggaaacaactttaccttcagctacacctttgaagacgttcctttccacagcagctacgctcacagccaaagtctggaccgtctcatgaatcctctcatcgaccagtacctgtattacttgagcaaaacaaacgctccaagcggaaccaccacgatgtccaggcttcagttttctcaggccggagcaagtgacattcgggaccagtctagaaactggcttcctggaccctgttaccgccagcagcgagtatcaaagacagctgcggacaacaacagtgattactcgtggactggagctaccaagtaccacctcaatggaagagactctctggtgaacccgggcccagctatggccagccacaaggacgatgaagaaaaatattttcctcagagcggggttctcatcttcgggaaacaaggctcaaataaaactaatgtggacattgaaaaggtcatgattacagacgaagaggaaatcaggaccaccaatcccgtggctacggagcagtacggtgctgtatctaccaaccttcaaagcggcaacacacaagcagctacctcagatgtcaacacacaaggcgttcttcctggcatggtctggcaggacagagacgtgtacctgcaggggcccatctgggcaaagattccccacacggatggacactttcacccttctcctcttatgggaggatttggattgaagcaccctcccccacagattctcatcaagaataccccggtacctgcgaatccttctaccaccttcagtgcggcaaagtttgcttctttcatcacacagtactccacagggcaggtcagcgtggagatcgagtgggagctgcagaaagagaacagcaaacgctggaaccccgagattcagtatacctccaactacaacaagtctgttaatgtggactttactgtggacactaatggcgtgtattcagagcctcgccccattggcacaagatacctgactcgtaatctgtaa

SEQ ID NO: 3980 - DNA, 2208 bp, Artificial Sequence
  source: /note="Description of Artificial Sequence: Synthetic polynucleotide"
atggctgccgatggttatcttccagattggctcgaggacactctctctgaaggaataagacagtggtggaagctcaaacctggcccaccaccgccaaagcccgcagagcggcataaggacgacagcaggggtcttgtgcttcctgggtacaagtacctcggacccttcaacggactcgacaaaggagagccggtcaacgaggcagacgccgcggccctcgagcacgacaaggcctacgaccggcagctcgacagcggagacaacccgtacctcaagtacaaccacgccgacgcggagtttcaggagcgccttaaagaagatacgtcttttgggggcaacctcgcaagagcagtattccaggcgaaaaagagggttcttgaacctctgggcctggttgaggagcctgttaagacggctccgggaaaaaagaggccggtagagcactctcctgcggagccagattcctcctccggaactggaaagtcgggccaacagcctgcaagaaagagattgaattttggtcagactggagacgcagactccgtacctgacccccagcctctcggacagccaccagcagccccctctggtctgggaactaatacgatggcttcaggcagtggcgcaccaatggcagacaataacgagggcgccgacggagtgggtaattcctcgggaaattggcattgcgattccacatggatgggcgacagagtcatcaccaccagcacccgcacctgggctctgcccacctacaacaaccatctgtacaagcaaatttccagccagtctggagccagcaacgacaaccactactttggctacagcaccccttgggggtattttgacttcaacagattccactgccacttctccccacgtgactggcaaagactcatcaacaacaattggggattccggcccaaaagactcaacttcaagctctttaacattcaagtcaaggaggtcacgcagaatgacggtacgacgacgattgccaataaccttaccagcacggttcaggtgtttactgactcggagtaccagctcccgtacgtcctcggctcggcgcatcaaggatgcctcccgccgttcccagcagacgtcttcatggtgccacagtatggatacctcaccctgaacaacgggagtcaggcggtaggacgctcttcattttactgcctggagtactttccttctcagatgctgcgtaccggaaacaactttaccttcagctacacctttgaggacgttccttttcacagcagctacgctcacagccagagtttggaccgtctcatgaatcctctcatcgaccagtacctgtattacttgagcagaacaaacactccaagcggaaccactacgcagtccaggcttcagttttctcaagccggagcgagtgacattcgggaccagtctaggaactggcttcctggaccctgttaccgccagcagcgagtatcaaagacagctgcggacaacaacaacagtgattactcgtggactggagctaccaagtatcacctcaatggaagagactctctggtgaatccgggcacagccatggccagccacaaggacgatgaagaaaagtattttcctcagagcggggttctcatcttcggaaaacaagactcgggaaaaactaatgtggacattgaaaaggtcatgattacagacgaagaggaaatcaggaccaccaatcccgtggctacggagcagtatggttctgtatctaccaatctccagagcggcaacacacaagcagctacctcagatgtcaacacacaaggcgttcttccaggcatggtctggcaggacagagacgtgtacctgcagggacccatctgggcaaagattccacacacggacggacattttcacccttctcctcttatgggaggatttggactgaagcaccctcccccgcagattctcatcaagaataccccggtacctgcgaatccttctaccaccttcagcgcggcaaagtttgcttccttcatcacacagtactccacggggcaggtcagcgtggagatcgagtgggagctgcagaaagagaacagcaaacgctggaaccccgagatccagtatacctccaactacaacaagtctgttaatgtggactttactgtggacactaatggcgtgtattcagagcctcgccccattggcacaagatacctgactcgtaatctgtaa

SEQ ID NO: 3981 - DNA, 2208 bp, Artificial Sequence
  source: /note="Description of Artificial Sequence: Synthetic polynucleotide"
atggctgccgatggttatcttccagattggctcgaggacactctctctgaaggaataagacagtggtggaagctcaaacctggcccaccaccgccaaagcccgcagagcggcataaggacgacagcaggggtcttgtgcttcctgggtacaagtacctcggacccttcaacggactcgacaaaggagagccggtcaacgaggcagacgccgcggccctcgagcacgacaaggcctacgaccggcagctcgacagcggagacaacccgtacctcaagtacaaccacgccgacgcggagtttcaggagcgccttaaagaagatacgtcttttgggggcaacctcgcaagagcagtattccaggcgaaaaagagggttcttgaacctctgggcctggttgaggagcctgttaagacggctccgggaaaaaagaggccggtagagcactctcctgcggagccagattcctcctccggaactggaaagtcgggccaacagcctgcaagaaagagattgaattttggtcagactggagacgcagactccgtacctgacccccagcctctcggacagccaccagcagccccctctggtctgggaactaatacgatggcttcaggcagtggcgcaccaatggcagacaataacgagggcgccgacggagtgggtaattcctcgggaaattggcattgcgattccacatggatgggcgacagagtcatcaccaccagcacccgcacctgggctctgcccacctacaacaaccatctgtacaagcaaatttccagccagtctggagccagcaacgacaaccactactttggctacagcaccccttgggggtattttgacttcaacagattccactgccacttctccccacgtgactggcaaagactcatcaacaacaattggggattccggcccaaaagactcaacttcaagctctttaacattcaagtcaaggaggtcacgcagaatgacggtacgacgacgattgccaataaccttaccagcacggttcaggtgtttactgactcggagtaccagctcccgtacgtcctcggctcggcgcatcaaggatgcctcccgccgttcccagcagacgtcttcatggtgccacagtatggatacctcaccctgaacaacgggagtcaggcggtaggacgctcttcattttactgcctggagtactttccttctcagatgctgcgtaccggaaacaactttaccttcagctacacctttgaggacgttccttttcacagcagctacgctcacagccagagtttggaccgtctcatgaatcctctcatcgaccagtacctgtattacttgagcagaacaaacactccaagcggaaccactacgcagtccaggcttcagttttctcaagccggagcgagtgacattcgggaccagtctaggaactggcttcctggaccctgttaccgccagcagcgagtatcaaagacagctgcggacaacaacaacagtgattactcgtggactggagctaccaagtatcacctcaatggaagagactctctggtgaatccgggcacagccatggccagccacaaggacgatgaagaaaagtattttcctcagagcggggttctcatcttccggaaacaagactcgggaaaaactaatgtggacattgaaaaggtcatgattacagacgaagaggaaatcaggaccaccaatcccgtggctacggagcagtatggttctgtatctaccaatctccagagcggcaacacacaagcagctacctcagatgtcaacacacaaggcgttcttccaggcatggtctggcaggacagagacgtgtacctgcagggacccatctgggcaaagattccacacacggacggacattttcacccttctcctcttatgggaggattgggacagaagcaccctcccccgcagagtctcatcaagaataccccggtacctgcgaatccttctaccaccttcagcgcggcaaagtttgcttccttcatcacacagtactccacggggcaggtcagcgtggagatcgagtgggagctgcagaaagagaacagcaaacgctggaaccccgagatccagtatacctccaactacaacaagtctgttaatgtggactttactgtggacactaatggcgtgtattcagagcctcgccccattggcacaagatacctgactcgtaatctgtaa

SEQ ID NO: 3982 - DNA, 2208 bp, Artificial Sequence
  source: /note="Description of Artificial Sequence: Synthetic polynucleotide"
atggctgccgatggttatcttccagattggctcgaggacactctctctgaaggaataagacagtggtggaagctcaaacctggcccaccaccgccaaagcccgcagagcggcataaggacgacagcaggggtcttgtgcttcctgggtacaagtacctcggacccttcaacggactcgacaaaggagagccggtcaacgaggcagacgccgcggccctcgagcacgacaaggcctacgaccggcagctcgacagcggagacaacccgtacctcaagtacaaccacgccgacgcggagtttcaggagcgccttaaagaagatacgtcttttgggggcaacctcgcaagagcagtattccaggcgaaaaagagggttcttgaacctctgggcctggttgaggagcctgttaagacggctccgggaaaaaagaggccggtagagcactctcctgcggagccagattcctcctccggaactggaaagtcgggccaacagcctgcaagaaagagattgaattttggtcagactggagacgcagactccgtacctgacccccagcctctcggacagccaccagcagccccctctggtctgggaactaatacgatggcttcaggcagtggcgcaccaatggcagacaataacgagggcgccgacggagtgggtaattcctcgggaaattggcattgcgattccacatggatgggcgacagagtcatcaccaccagcacccgcacctgggctctgcccacctacaacaaccatctgtacaagcaaatttccagccagtctggagccagcaacgacaaccactactttggctacagcaccccttgggggtattttgacttcaacagattccactgccacttctccccacgtgactggcaaagactcatcaacaacaattggggattccggcccaaaagactcaacttcaagctctttaacattcaagtcaaggaggtcacgcagaatgacggtacgacgacgattgccaataaccttaccagcacggttcaggtgtttactgactcggagtaccagctcccgtacgtcctcggctcggcgcatcaaggatgcctcccgccgttcccagcagacgtcttcatggtgccacagtatggatacctcaccctgaacaacgggagtcaggcggtaggacgctcttcattttactgcctggagtactttccttctcagatgctgcgtaccggaaacaactttaccttcagctacacctttgaggacgttccttttcacagcagctacgctcacagccagagtttggaccgtctcatgaatcctctcatcgaccagtacctgtattacttgagcagaacaaacactccaagcggaaccactacgcagtccaggcttcagttttctcaagccggagcgagtgacattcgggaccagtctaggaactggcttcctggaccctgttaccgccagcagcgagtatcaaagacagctgcggacaacaacaacagtgattactcgtggactggagctaccaagtatcacctcaatggaagagactctctggtgaatccgggcacagccatggccagccacaaggacgatgaagaaaagtattttcctcagagcggggttctcatcttcggaaaacaagactcgggaaaaactaatgtggacattgaaaaggtcatgattacagacgaagaggaaatcaggaccaccaatcccgtggctacggagcagtatggttctgtatctaccaatctccagagcggcaacacacaagcagctacctcagatgtcaacacacaaggcgttcttccaggcatggtctggcaggacagagacgtgtacctgcagggacccatctgggcaaagattccacacacggacggacattttcacccttctcctcttatgggaggattgggacagaagcaccctcccccgcagattctcatcaagaataccccggtacctgcgaatccttctaccaccttcagcgcggcaaagtttgcttccttcatcacacagtactccacggggcaggtcagcgtggagatcgagtgggagctgcagaaagagaacagcaaacgctggaaccccgagatccagtatacctccaactacaacaagtctgttaatgtggactttactgtggacactaatggcgtgtattcagagcctcgccccattggcacaagatacctgactcgtaatctgtaa

SEQ ID NO: 3983 - DNA, 2208 bp, Artificial Sequence
  source: /note="Description of Artificial Sequence: Synthetic polynucleotide"
atggctgccgatggttatcttccagattggctcgaggacactctctctgaaggaataagacagtggtggaagctcaaacctggcccaccaccgccaaagcccgcagagcggcataaggacgacagcaggggtcttgtgcttcctgggtacaagtacctcggacccttcaacggactcgacaaaggagagccggtcaacgaggcagacgccgcggccctcgagcacgacaaggcctacgaccggcagctcgacagcggagacaacccgtacctcaagtacaaccacgccgacgcggagtttcaggagcgccttaaagaagatacgtcttttgggggcaacctcgcaagagcagtattccaggcgaaaaagagggttcttgaacctctgggcctggttgaggagcctgttaagacggctccgggaaaaaagaggccggtagagcactctcctgcggagccagattcctcctccggaactggaaagtcgggccaacagcctgcaagaaagagattgaattttggtcagactggagacgcagactccgtacctgacccccagcctctcggacagccaccagcagccccctctggtctgggaactaatacgatggcttcaggcagtggcgcaccaatggcagacaataacgagggcgccgacggagtgggtaattcctcgggaaattggcattgcgattccacatggatgggcgacagagtcatcaccaccagcacccgcacctgggctctgcccacctacaacaaccatctgtacaagcaaatttccagccagtctggagccagcaacgacaaccactactttggctacagcaccccttgggggtattttgacttcaacagattccactgccacttctccccacgtgactggcaaagactcatcaacaacaattggggattccggcccaaaagactcaacttcaagctctttaacattcaagtcaaggaggtcacgcagaatgacggtacgacgacgattgccaataaccttaccagcacggttcaggtgtttactgactcggagtaccagctcccgtacgtcctcggctcggcgcatcaaggatgcctcccgccgttcccagcagacgtcttcatggtgccacggtatggatacctcaccctgaacaacgggagtcaggcggtaggacgctcttcattttactgcctggagtactttccttctcagatgctgcgtaccggaaacaactttaccttcagctacacctttgaggacgttccttttcacagcagctacgctcacagccagagtttggaccgtctcatgaatcctctcatcgaccagtacctgtattacttgagcagaacaaacactccaagcggaaccactacgcagtccaggcttcagttttctcaagccggagcgagtgacattcgggaccagtctaggaactggcttcctggaccctgttaccgccagcagcgagtatcaaagacagctgcggacaacaacaacagtgattactcgtggactggagctaccaagtatcacctcaatggaagagactctctggtgaatccgggcacagccatggccagccacaaggacgatgaagaaaagtattttcctcagagcggggttctcatcttccggaaacaagactcgggaaaaactaatgtggacattgaaaaggtcatgattacagacgaagaggaaatcaggaccaccaatcccgtggctacggagcagtatggttctgtatctaccaatctccagagcggcaacacacaagcagctacctcagatgtcaacacacaaggcgttcttccaggcatggtctggcaggacagagacgtgtacctgcagggacccatctgggcaaagattccacacacggacggacattttcacccttctcctcttatgggaggatttggactgaagcaccctcccccgcagattctcatcaagaataccccggtacctgcgaatccttctaccaccttcagcgcggcaaagtttgcttccttcatcacacagtactccacggggcaggtcagcgtggagatcgagtgggagctgcagaaagagaacagcaaacgctggaaccccgagatccagtatacctccaactacaacaagtctgttaatgtggactttactgtggacactaatggcgtgtattcagagcctcgccccattggcacaagatacctgactcgtaatctgtaa

SEQ ID NO: 3984 - DNA, 2208 bp, Artificial Sequence
  source: /note="Description of Artificial Sequence: Synthetic polynucleotide"
atggctgccgatggttatcttccagattggctcgaggacactctctctgaaggaataagacagtggtggaagctcaaacctggcccaccaccgccaaagcccgcagagcggcataaggacgacagcaggggtcttgtgcttcctgggtacaagtacctcggacccttcaacggactcgacaaaggagagccggtcaacgaggcagacgccgcggccctcgagcacgacaaggcctacgaccggcagctcgacagcggagacaacccgtacctcaagtacaaccacgccgacgcggagtttcaggagcgccttaaagaagatacgtcttttgggggcaacctcgcaagagcagtattccaggcgaaaaagagggttcttgaacctctgggcctggttgaggagcctgttaagacggctccgggaaaaaagaggccggtagagcactctcctgcggagccagattcctcctccggaactggaaagtcgggccaacagcctgcaagaaagagattgaattttggtcagactggagacgcagactccgtacctgacccccagcctctcggacagccaccagcagccccctctggtctgggaactaatacgatggcttcaggcagtggcgcaccaatggcagacaataacgagggcgccgacggagtgggtaattcctcgggaaattggcattgcgattccacatggatgggcgacagagtcatcaccaccagcacccgcacctgggctctgcccacctacaacaaccatctgtacaagcaaatttccagccagtctggagccagcaacgacaaccactactttggctacagcaccccttgggggtattttgacttcaacagattccactgccacttctccccacgtgactggcaaagactcatcaacaacaattggggattccggcccaaaagactcaacttcaagctctttaacattcaagtcaaggaggtcacgcagaatgacggtacgacgacgattgccaataaccttaccagcacggttcaggtgtttactgactcggagtaccagctcccgtacgtcctcggctcggcgcatcaaggatgcctcccgccgttcccagcagacgtcttcatggtgccacagtatggatacctcaccctgaacaacgggagtcaggcggtaggacgctcttcattttactgcctggagtactttccttctcagatgctgcgtaccggaaacaactttaccttcagctacacctttgaggacgttccttttcacagcagctacgctcacagccagagtttggaccgtctcatgaatcctctcatcgaccagtacctgtattacttgagcagaacaaacactccaagcggaaccactacgcagtccaggcttcagttttctcaagccggagcgagtgacattcgggaccagtctaggaactggcttcctggaccctgttaccgccagcagcgagtatcaaagacagctgcggacaacaacaacagtgattactcgtggactggagctaccaagtatcacctcaatggaagagactctctggtgaatccgggcacagccatggccagccacaaggacgatgaagaaaagtattttcctcagagcggggttctcatcttccggaaacaagactcgggaaaaactaatgtggacattgaaaaggtcatgattacagacgaagaggaaatcaggaccaccaatcccgtggctacggagcagtatggttctgtatctaccaatctccagagcggcaacacacaagcagctacctcagatgtcaacacacaaggcgttcttccaggcatggtctggcaggacagagacgtgtacctgcagggacccatctgggcaaagattccacacacggacggacattttcacccttctcctcttatgggaggatttggactgaagcaccctcccccgcagattctcatcaagaataccccggtacctgcgaatccttctaccaccttcagcgcggcaaagtttgcttccttcatcacacagtactccacggggcaggtcagcgtggagatcgagtgggagctgcagaaagagaacagcaaacgctggaaccccgagatccagtatacctccaactacaacaagtctgttaatgtggactttactgtggacactaatggcgtgtattcagagcctcgccccattggcacaagatacctgactcgtaatctgtaa

SEQ ID NO: 3985 - DNA, 2208 bp, Artificial Sequence
  source: /note="Description of Artificial Sequence: Synthetic polynucleotide"
atggctgccgatggttatcttccagattggctcgaggacactctctctgaaggaataagacagtggtggaagctcaaacctggcccaccaccgccaaagcccgcagagcggcataaggacgacagcaggggtcttgtgcttcctgggtacaagtacctcggacccttcaacggactcgacaaaggagagccggtcaacgaggcagacgccgcggccctcgagcacgacaaggcctacgaccggcagctcgacagcggagacaacccgtacctcaagtacaaccacgccgacgcggagtttcaggagcgccttaaagaagatacgtcttttgggggcaacctcgcaagagcagtattccaggcgaaaaagagggttcttgaacctctgggcctggttgaggagcctgttaagacggctccgggaaaaaagaggccggtagagcactctcctgcggagccagattcctcctccggaactggaaagtcgggccaacagcctgcaagaaagagattgaattttggtcagactggagacgcagactccgtacctgacccccagcctctcggacagccaccagcagccccctctggtctgggaactaatacgatggcttcaggcagtggcgcaccaatggcagacaataacgagggcgccgacggagtgggtaattcctcgggaaattggcattgcgattccacatggatgggcgacagagtcatcaccaccagcacccgcacctgggctctgcccacctacaacaaccatctgtacaagcaaatttccagccagtctggagccagcaacgacaaccactactttggctacagcaccccttgggggtattttgacttcaacagattccactgccacttctccccacgtgactggcaaagactcatcaacaacaattggggattccggcccaaaagactcaacttcaagctctttaacattcaagtcaaggaggtcacgcagaatgacggtacgacgacgattgccaataaccttaccagcacggttcaggtgtttactgactcggagtaccagctcccgtacgtcctcggctcggcgcatcaaggatgcctcccgccgttcccagcagacgtcttcatggtgccacggtatggatacctcaccctgaacaacgggagtcaggcggtaggacgctcttcattttactgcctggagtactttccttctcagatgctgcgtaccggaaacaactttaccttcagctacacctttgaggacgttccttttcacagcagctacgctcacagccagagtttggaccgtctcatgaatcctctcatcgaccagtacctgtattacttgagcagaacaaacactccaagcggaaccactacgcagtccaggcttcagttttctcaagccggagcgagtgacattcgggaccagtctaggaactggcttcctggaccctgttaccgccagcagcgagtatcaaagacagctgcggacaacaacaacagtgattactcgtggactggagctaccaagtatcacctcaatggaagagactctctggtgaatccgggcacagccatggccagccacaaggacgatgaagaaaagtattttcctcagagcggggttctcatcttcggaaaacaagactcgggaaaaactaatgtggacattgaaaaggtcatgattacagacgaagaggaaatcaggaccaccaatcccgtggctacggagcagtatggttctgtatctaccaatctccagagcggcaacacacaagcagctacctcagatgtcaacacacaaggcgttcttccaggcatggtctggcaggacagagacgtgtacctgcagggacccatctgggcaaagattccacacacggacggacattttcacccttctcctcttatgggaggatttggactgaagcaccctcccccgcagattctcatcaagaataccccggtacctgcgaatccttctaccaccttcagcgcggcaaagtttgcttccttcatcacacagtactccacggggcaggtcagcgtggagatcgagtgggagctgcagaaagagaacagcaaacgctggaaccccgagatccagtatacctccaactacaacaagtctgttaatgtggactttactgtggacactaatggcgtgtattcagagcctcgccccattggcacaagatacctgactcgtaatctgtaa

SEQ ID NO: 3986 - DNA, 2208 bp, Artificial Sequence
  source: /note="Description of Artificial Sequence: Synthetic polynucleotide"
atggctgccgatggttatcttccagattggctcgaggacactctctctgaaggaataagacagtggtggaagctcaaacctggcccaccaccgccaaagcccgcagagcggcataaggacgacagcaggggtcttgtgcttcctgggtacaagtacctcggacccttcaacggactcgacaaaggagagccggtcaacgaggcagacgccgcggccctcgagcacgacaaggcctacgaccggcagctcgacagcggagacaacccgtacctcaagtacaaccacgccgacgcggagtttcaggagcgccttaaagaagatacgtcttttgggggcaacctcgcaagagcagtattccaggcgaaaaagagggttcttgaacctctgggcctggttgaggagcctgttaagacggctccgggaaaaaagaggccggtagagcactctcctgcggagccagattcctcctccggaactggaaagtcgggccaacagcctgcaagaaagagattgaattttggtcagactggagacgcagactccgtacctgacccccagcctctcggacagccaccagcagccccctctggtctgggaactaatacgatggcttcaggcagtggcgcaccaatggcagacaataacgagggcgccgacggagtgggtaattcctcgggaaattggcattgcgattccacatggatgggcgacagagtcatcaccaccagcacccgcacctgggctctgcccacctacaacaaccatctgtacaagcaaatttccagccagtctggagccagcaacgacaaccactactttggctacagcaccccttgggggtattttgacttcaacagattccactgccacttctccccacgtgactggcaaagactcatcaacaacaattggggattccggcccaaaagactcaacttcaagctctttaacattcaagtcaaggaggtcacgcagaatgacggtacgacgacgattgccaataaccttaccagcacggttcaggtgtttactgactcggagtaccagctcccgtacgtcctcggctcggcgcatcaaggatgcctcccgccgttcccagcagacgtcttcatggtgccacagtatggatacctcaccctgaacaacgggagtcaggcggtaggacgctcttcattttactgcctggagtactttccttctcagatgctgcgtaccggaaacaactttaccttcagctacacctttgaggacgttccttttcacagcagctacgctcacagccagagtttggaccgtctcatgaatcctctcatcgaccagtacctgtattacttgagcagaacaaacactccaagcggaaccactacgcagtccaggcttcagttttctcaagccggagcgagtgacattcgggaccagtctaggaactggcttcctggaccctgttaccgccagcagcgagtatcaaagacagctgcggacaacaacaacagtgattactcgtggactggagctaccaagtatcacctcaatggaagagactctctggtgaatccgggcacagccatggccagccacaaggacgatgaagaaaagtattttcctcagagcggggttctcatcttcggaaaacaagactcgggaaaaactaatgtggacattgaaaaggtcatgattacagacgaagaggaaatcaggaccaccaatcccgtggctacggagcagtatggttctgtatctaccaatctccagagcggcaacacacaagcagctacctcagatgtcaacacacaaggcgttcttccaggcatggtctggcaggacagagacgtgtacctgcagggacccatctgggcaaagattccacacacggacggacattttcacccttctcctcttatgggaggattgggacagaagcaccctcccccgcagagtctcatcaagaataccccggtacctgcgaatccttctaccaccttcagcgcggcaaagtttgcttccttcatcacacagtactccacggggcaggtcagcgtggagatcgagtgggagctgcagaaagagaacagcaaacgctggaaccccgagatccagtatacctccaactacaacaagtctgttaatgtggactttactgtggacactaatggcgtgtattcagagcctcgccccattggcacaagatacctgactcgtaatctgtaa

SEQ ID NO: 3987 - DNA, 2208 bp, Artificial Sequence
  source: /note="Description of Artificial Sequence: Synthetic polynucleotide"
atggctgccgatggttatcttccagattggctcgaggacactctctctgaaggaataagacagtggtggaagctcaaacctggcccaccaccgccaaagcccgcagagcggcataaggacgacagcaggggtcttgtgcttcctgggtacaagtacctcggacccttcaacggactcgacaaaggagagccggtcaacgaggcagacgccgcggccctcgagcacgacaaggcctacgaccggcagctcgacagcggagacaacccgtacctcaagtacaaccacgccgacgcggagtttcaggagcgccttaaagaagatacgtcttttgggggcaacctcgcaagagcagtattccaggcgaaaaagagggttcttgaacctctgggcctggttgaggagcctgttaagacggctccgggaaaaaagaggccggtagagcactctcctgcggagccagattcctcctccggaactggaaagtcgggccaacagcctgcaagaaagagattgaattttggtcagactggagacgcagactccgtacctgacccccagcctctcggacagccaccagcagccccctctggtctgggaactaatacgatggcttcaggcagtggcgcaccaatggcagacaataacgagggcgccgacggagtgggtaattcctcgggaaattggcattgcgattccacatggatgggcgacagagtcatcaccaccagcacccgcacctgggctctgcccacctacaacaaccatctgtacaagcaaatttccagccagtctggagccagcaacgacaaccactactttggctacagcaccccttgggggtattttgacttcaacagattccactgccacttctccccacgtgactggcaaagactcatcaacaacaattggggattccggcccaaaagactcaacttcaagctctttaacattcaagtcaaggaggtcacgcagaatgacggtacgacgacgattgccaataaccttaccagcacggttcaggtgtttactgactcggagtaccagctcccgtacgtcctcggctcggcgcatcaaggatgcctcccgccgttcccagcagacgtcttcatggtgccacagtatggatacctcaccctgaacaacgggagtcaggcggtaggacgctcttcattttactgcctggagtactttccttctcagatgctgcgtaccggaaacaactttaccttcagctacacctttgaggacgttccttttcacagcagctacgctcacagccagagtttggaccgtctcatgaatcctctcatcgaccagtacctgtattacttgagcagaacaaacactccaagcggaaccactacgcagtccaggcttcagttttctcaagccggagcgagtgacattcgggaccagtctaggaactggcttcctggaccctgttaccgccagcagcgagtatcaaagacagctgcggacaacaacaacagtgattactcgtggactggagctaccaagtatcacctcaatggaagagactctctggtgaatccgggcacagccatggccagccacaaggacgatgaagaaaagtattttcctcagagcggggttctcatcttcggaaaacaagactcggagaaaactaatgtggacattgaaaaggtcatgattacagacgaagaggaaatcaggaccaccaatcccgtggctacggagcagtatggttctgtatctaccaatctccagagcggcaacacacaagcagctacctcagatgtcaacacacaaggcgttcttccaggcatggtctggcaggacagagacgtgtacctgcagggacccatctgggcaaagattccacacacggacggacattttcacccttctcctcttatgggaggatttggactgaagcaccctcccccgcagattctcatcaagaataccccggtacctgcgaatccttctaccaccttcagcgcggcaaagtttgcttccttcatcacacagtactccacggggcaggtcagcgtggagatcgagtgggagctgcagaaagagaacagcaaacgctggaaccccgagatccagtatacctccaactacaacaagtctgttaatgtggactttactgtggacactaatggcgtgtattcagagcctcgccccattggcacaagatacctgactcgtaatctgtaa

SEQ ID NO: 3988 - DNA, 2208 bp, Artificial Sequence
  source: /note="Description of Artificial Sequence: Synthetic polynucleotide"
atggctgccgatggttatcttccagattggctcgaggacactctctctgaaggaataagacagtggtggaagctcaaacctggcccaccaccgccaaagcccgcagagcggcataaggacgacagcaggggtcttgtgcttcctgggtacaagtacctcggacccttcaacggactcgacaaaggagagccggtcaacgaggcagacgccgcggccctcgagcacgacaaggcctacgaccggcagctcgacagcggagacaacccgtacctcaagtacaaccacgccgacgcggagtttcaggagcgccttaaagaagatacgtcttttgggggcaacctcgcaagagcagtattccaggcgaaaaagagggttcttgaacctctgggcctggttgaggagcctgttaagacggctccgggaaaaaagaggccggtagagcactctcctgcggagccagattcctcctccggaactggaaagtcgggccaacagcctgcaagaaagagattgaattttggtcagactggagacgcagactccgtacctgacccccagcctctcggacagccaccagcagccccctctggtctgggaactaatacgatggcttcaggcagtggcgcaccaatggcagacaataacgagggcgccgacggagtgggtaattcctcgggaaattggcattgcgattccacatggatgggcgacagagtcatcaccaccagcacccgcacctgggctctgcccacctacaacaaccatctgtacaagcaaatttccagccagtctggagccagcaacgacaaccactactttggctacagcaccccttgggggtattttgacttcaacagattccactgccacttctccccacgtgactggcaaagactcatcaacaacaattggggattccggcccaaaagactcaacttcaagctctttaacattcaagtcaaggaggtcacgcagaatgacggtacgacgacgattgccaataaccttaccagcacggttcaggtgtttactgactcggagtaccagctcccgtacgtcctcggctcggcgcatcaaggatgcctcccgccgttcccagcagacgtcttcatggtgccacagtatggatacctcaccctgaacaacgggagtcaggcggtaggacgctcttcattttactgcctggagtactttccttctcagatgctgcgtaccggaaacaactttaccttcagctacacctttgaggacgttccttttcacagcagctacgctcacagccagagtttggaccgtctcatgaatcctctcatcgaccagtacctgtattacttgagcagaacaaacactccaagcggaaccactacgcagtccaggcttcagttttctcaagccggagcgagtgacattcgggaccagtctaggaactggcttcctggaccctgttaccgccagcagcgagtatcaaagacagctgcggacaacaacaacagtgattactcgtggactggagctaccaagtatcacctcaatggaagagactctctggtgaatccgggcacagccatggccagccacaaggacgatgaagaaaagtattttcctcagagcggggttctcatcttcggaaaacaagactcgggaaaaactaatgtggacattgaaaaggtcatgattacagacgaagaggaaatcaggaccaccaatcccgtggctacggagcagtatggttctgtatctaccaatctccagagcggcaacacacaagcagctacctcagatgtcaacacacaaggcgttcttccaggcatggtctggcaggacagagacgtgtacctgcagggacccatctgggcaaagattccacacacggacggacattttcacccttctcctcttatgggaggatttggacagaagcaccctcccccgcagagtctcatcaagaataccccggtacctgcgaatccttctaccaccttcagcgcggcaaagtttgcttccttcatcacacagtactccacggggcaggtcagcgtggagatcgagtgggagctgcagaaagagaacagcaaacgctggaaccccgagatccagtatacctccaactacaacaagtctgttaatgtggactttactgtggacactaatggcgtgtattcagagcctcgccccattggcacaagatacctgactcgtaatctgtaa

SEQ ID NO: 3989 - DNA, 2208 bp, Artificial Sequence
  source: /note="Description of Artificial Sequence: Synthetic polynucleotide"
atggctgccgatggttatcttccagattggctcgaggacactctctctgaaggaataagacagtggtggaagctcaaacctggcccaccaccgccaaagcccgcagagcggcataaggacgacagcaggggtcttgtgcttcctgggtacaagtacctcggacccttcaacggactcgacaaaggagagccggtcaacgaggcagacgccgcggccctcgagcacgacaaggcctacgaccggcagctcgacagcggagacaacccgtacctcaagtacaaccacgccgacgcggagtttcaggagcgccttaaagaagatacgtcttttgggggcaacctcgcaagagcagtattccaggcgaaaaagagggttcttgaacctctgggcctggttgaggagcctgttaagacggctccgggaaaaaagaggccggtagagcactctcctgcggagccagattcctcctccggaactggaaagtcgggccaacagcctgcaagaaagagattgaattttggtcagactggagacgcagactccgtacctgacccccagcctctcggacagccaccagcagccccctctggtctgggaactaatacgatggcttcaggcagtggcgcaccaatggcagacaataacgagggcgccgacggagtgggtaattcctcgggaaattggcattgcgattccacatggatgggcgacagagtcatcaccaccagcacccgcacctgggctctgcccacctacaacaaccatctgtacaagcaaatttccagccagtctggagccagcaacgacaaccactactttggctacagcaccccttgggggtattttgacttcaacagattccactgccacttctccccacgtgactggcaaagactcatcaacaacaattggggattccggcccaaaagactcaacttcaagctctttaacattcaagtcaaggaggtcacgcagaatgacggtacgacgacgattgccaataaccttaccagcacggttcaggtgtttactgactcggagtaccagctcccgtacgtcctcggctcggcgcatcaaggatgcctcccgccgttcccagcagacgtcttcatggtgccacagtatggatacctcaccctgaacaacgggagtcaggcggtaggacgctcttcattttactgcctggagtactttccttctcagatgctgcgtaccggaaacaactttaccttcagccacacctttgaggacgttccttttcacagcagctacgctcacagccagagtttggaccgtctcatgaatcctctcatcgaccagtacctgtattacttgagcagaacaaacactccaagcggaaccactacgcagtccaggcttcagttttctcaagccggagcgagtgacattcgggaccagtctaggaactggcttcctggaccctgttaccgccagcagcgagtatcaaagacagctgcggacaacaacaacagtgattactcgtggactggagctaccaagtatcacctcaatggaagagactctctggtgaatccgggcacagccatggccagccacaaggacgatgaagaaaagtattttcctcagagcggggttctcatcttcggaaaacaagactcgggaaaaactaatgtggacattgaaaaggtcatgattacagacgaagaggaaatcaggaccaccaatcccgtggctacggagcagtatggttctgtatctaccaatctccagagcggcaacacacaagcagctacctcagatgtcaacacacaaggcgttcttccaggcatggtctggcaggacagagacgtgtacctgcagggacccatctgggcaaagattccacacacggacggacattttcacccttctcctcttatgggaggatttggactgaagcaccctcccccgcagattctcatcaagaataccccggtacctgcgaatccttctaccaccttcagcgcggcaaagtttgcttccttcatcacacagtactccacggggcaggtcagcgtggagatcgagtgggagctgcagaaagagaacagcaaacgctggaaccccgagatccagtatacctccaactacaacaagtctgttaatgtggactttactgtggacactaatggcgtgtattcagagcctcgccccattggcacaagatacctgactcgtaatctgtaa

SEQ ID NO: 3990 - DNA, 2208 bp, Artificial Sequence
  source: /note="Description of Artificial Sequence: Synthetic polynucleotide"
atggctgccgatggttatcttccagattggctcgaggacactctctctgaaggaataagacagtggtggaagctcaaacctggcccaccaccgccaaagcccgcagagcggcataaggacgacagcaggggtcttgtgcttcctgggtacaagtacctcggacccttcaacggactcgacaaaggagagccggtcaacgaggcagacgccgcggccctcgagcacgacaaggcctacgaccggcagctcgacagcggagacaacccgtacctcaagtacaaccacgccgacgcggagtttcaggagcgccttaaagaagatacgtcttttgggggcaacctcgcaagagcagtattccaggcgaaaaagagggttcttgaacctctgggcctggttgaggagcctgttaagacggctccgggaaaaaagaggccggtagagcactctcctgcggagccagattcctcctccggaactggaaagtcgggccaacagcctgcaggaaagagattgaattttggtcggactggagacgcagactccgtacctgacccccagcctctcggacagccaccagcagccccctctggtctgggaactaatacgatggcttcaggcagtggcgcaccaatggcagacaataacgagggcgccgacggagtgggtaattcctcgggaaattggcattgcgattccacatggatgggcgacagagtcatcaccaccagcacccgcacctgggctctgcccacctacaacaaccatctgtacaagcaaatttccagccagtctggagccagcaacgacaaccactactttggctacagcaccccttgggggtattttgacttcaacagattccactgccacttctccccacgtgactggcaaagactcatcaacaacaattggggattccggcccaaaagactcaacttcaagctctttaacattcaagtcaaggaggtcacgcagaatgacggtacgacgacgattgccaataaccttaccagcacggttcaggtgtttactgactcggagtaccagctcccgtacgtcctcggctcggcgcatcaaggatgcctcccgccgttcccagcagacgtcttcatggtgccacagtatggatacctcaccctgaacaacgggagtcaggcggtaggacgctcttcattttactgcctggagtactttccttctcagatgctgcgtaccggaaacaactttaccttcagctacacctttgaggacgttccttttcacagcagctacgctcacagccagagtttggaccgtctcatgaatcctctcatcgaccagtacctgtattacttgagcagaacaaacactccaagcggaaccactacgcagtccaggcttcagttttctccagccggagcgagtgacattcgggaccagtctaggaactggcttcctggaccctgttaccgccagcagcgagtatcaaagacagctgcggacaacaacaacagtgattactcgtggactggagctaccaagtatcacctcaatggaagagactctctggtgaatccgggcacagccatggccagccacaaggacgatgaagaaaagtattttcctcagagcggggttctcatcttcggaaaacaagactcgggaaaaactaatgtggacattgaaaaggtcatgattacagacgaagaggaaatcaggaccaccaatcccgtggctacggagcagtatggttctgtatctaccaatctccagagcggcaacacacaagcagctacctcagatgtcaacacacaaggcgttcttccaggcatggtctggcaggacagagacgtgtacctgcagggacccatctgggcaaagattccacacacggacggacattttcacccttctcctcttatgggaggatttggactgaagcaccctcccccgcagattctcatcaagaataccccggtacctgcgaatccttctaccaccttcagcgcggcaaagtttgcttccttcatcacacagtactccacggggcaggtcagcgtggagatcgagtgggagctgcagaaagagaacagcaaacgctggaaccccgagatccagtatacctccaactacaacaagtctgttaatgtggactttactgtggacactaatggcgtgtattcagagcctcgccccattggcacaagatacctgactcgtaatctgtaa

SEQ ID NO: 3991 - DNA, 2205 bp, Artificial Sequence
  source: /note="Description of Artificial Sequence: Synthetic polynucleotide"
atggctgccgatggttatcttccagattggctcgaggacactctctctgaaggaataagacagtggtggaagctcaaacctggcccaccaccgccaaagcccgcagagcggcataaggacgacagcaggggtcttgtgcttcctgggtacaagtacctcggacccttcaacggactcgacaaaggagagccggtcaacgaggcagacgccgcggccctcgagcacgacaaggcctacgaccggcagctcgacagcggagacaacccgtacctcaagtacaaccacgccgacgcggagtttcaggagcgccttaaagaagatacgtcttttgggggcaacctcgcaagagcagtattccaggcgaaaaagagggttcttgaacctctgggcctggttgaggagcctgttaagacggctccgggaaaaaagaggccggtagagcactctcctgcggagccagattcctcctccggaactggaaagtcgggccaacagcctgcaagaaagagattgaattttggtcagactggagacgcagactccgtacctgacccccagcctctcggacagccaccagcagccccctctggtctgggaactaatacgatggcttcaggcagtggcgcaccaatggcagacaataacgagggcgccgacggagtgggtaattcctcgggaaattggcattgcgattccacatggatgggcgacagagtcatcaccaccagcacccgcacctgggctctgcccacctacaacaaccatctgtacaagcaaatttccagccagtctggagccagcaacgacaaccactactttggctacagcaccccttgggggtattttgacttcaacagattccactgccacttctccccacgtgactggcaaagactcatcaacaacaattggggattccggcccaaaagactcaacttcaagctctttaacattcaagtcaaggaggtcacgcagaatgacggtacgacgacgattgccaataaccttaccagcacggttcaggtgtttactgactcggagtaccagctcccgtacgtcctcggctcggcgcatcaaggatgcctcccgccgttcccagcagacgtcttcatggtgccacagtatggatacctcaccctgaacaacgggagtcaggcggtaggacgctcttcattttactgcctggagtactttccttctcagatgctgcgtaccggaaacaactttaccttcagctacacctttgaggacgttccttttcacagcagctacgctcacagccagagtttggaccgtctcatgaatcctctcatcgaccagtacctgtattacttgagcagaacaaacactccaagcggaaccactacgcagtccaggcttcagttttctcaagccggagcgagtgacattcgggaccagtctaggaactggcttcctggaccctgttaccgccagcagcgagtatcaaagacagctgcggacaacaacagtgattactcgtggactggagctaccaagtatcacctcaatggaagagactctctggtgaatccgggcacagccatggccagccacaaggacgatgaagaaaagtattttcctcagagcggggttctcatcttcggaaaacaagactcgggaaaaactaatgtggacattgaaaaggtcatgattacagacgaagaggaaatcaggaccaccaatcccgtggctacggagcagtatggttctgtatctaccaatctccagagcggcaacacacaagcagctacctcagatgtcaacacacaaggcgttcttccaggcatggtctggcaggacagagacgtgtacctgcagggacccatctgggcaaagattccacacacggacggacattttcacccttctcctcttatgggaggatttggactgaagcaccctcccccgcagattctcatcaagaataccccggtacctgcgaatccttctaccaccttcagcgcggcaaagtttgcttccttcatcacacagtactccacggggcaggtcagcgtggagatcgagtgggagctgcagaaagagaacagcaaacgctggaaccccgagatccagtatacctccaactacaacaagtctgttaatgtggactttactgtggacactaatggcgtgtattcagagcctcgccccattggcacaagatacctgactcgtaatctgtaa

SEQ ID NO: 3992 - DNA, 2217 bp, Artificial Sequence
  source: /note="Description of Artificial Sequence: Synthetic polynucleotide"
atggctgccgatggttatcttccagattggctcgaggacaacctctctgagggcattcgcgagtggtgggcgctgaaacctggagccccgaagcccaaagccaaccagcaaaagcaggacgacggccggggtctggtgcttcctggctacaagtacctcggacccttcaacggactcgacaagggggagcccgtcaacgcggcggacgcagcggccctcgagcacgacaaggcctacgaccagcagctgcaggcgggtgacaatccgtacctgcggtataaccacgccgacgccgagtttcaggagcgtctgcaagaagatacgtcttttgggggcaacctcgggcgagcagtcttccaggccaagaagcgggttctcgaacctctcggtctggttgaggaaggcgctaagacggctcctggaaagaagagaccggtagagccatcaccccagcgttctccagactcctctacgggcatcggcaagaaaggccaacagcccgccagaaaaagactcaattttggtcagactggcgactcagagtcagttccagaccctcaacctctcggagaacctccagcagcgccctctggtgtgggacctaatacaatggctgcaggcggtggcgcaccaatggcagacaataacgaaggcgccgacggagtgggtagttcctcgggaaattggcattgcgattccacatggctgggcgacagagtcatcaccgccagcacccgaacctgggccctgcccacctacaacaaccacctctacaagcaaatctccaacgggacatcggggggagccaccaacgacaacacctacttcggctacagcaccccctgggggtattttgactttaacagattccactgccacttttcaccacgtgactggcagcgactcatcaacaacaactggggattccggcccaagagactcagcttcaagctcttcaacatccaggtcaaggaggtcacgcagaatgaaggcaccaagaccatcgccaataacctcaccagcaccatccaggtgtttacggactcggagtaccagctgccgtacgttctcggctctgcccaccagggctgcctgcctccgttcccggcggacgtgttcacgattccccagtacggctacctaacactcaacaacggtagtcaggccgtgggacgctcctccttctactgcctggaatactttccttcgcagatgctgagaaccggcaacaacttccagtttacttacaccttcgaggacgtgcctttccacagcagctacgcccacagccagagcttggaccggctgatgaatcctctgattgaccagtacctgtactacttgtctcggactcaaacaacaggaggcacggcaaatacgcagactctgggcttcagccaaggtgggcctaatacaatggccaatcaggcaaagaactggctgccaggaccctgttaccgccaacaacgcgtctcaacgacaaccgggcaaaacaacaatagcaactttgcctggactgctgggaccaaataccatctgaatggaagaaattcattggctaatcctggcatcgctatggcaacacacaaagacgacgaggagcgtttttttcccagtaacgggatcctgatttttggcaaacaaaatgctgccagagacaatgcggattacagcgatgtcatgctcaccagcgaggaagaaatcaaaaccactaaccctgtggctacagaggaatacggtatcgtggcagataacttgcagcagcaaaacacggctcctcaaattggaactgtcaacagccagggggccttacccggtatggtctggcagaaccgggacgtgtacctgcagggtcccatctgggccaagattcctcacacggacggcaacttccacccgtctccgctgatgggcggctttggcctgaaacatcctccgcctcagatcctgatcaagaacacgcctgtacctgcggatcctccgaccaccttcaaccagtcaaagctgaactctttcatcacgcaatacagcaccggacaggtcagcgtggaaattgaatgggagctgcagaaggaaaacagcaagcgctggaaccccgagatccagtacacctccaactactacaaatctacaagtgtggactttgctgttaatacagaaggcgtgtactctgaaccccgccccattggcacccgttacctcacccgtaatctgtaa

SEQ ID NO: 3993 - DNA, 2217 bp, Artificial Sequence
  source: /note="Description of Artificial Sequence: Synthetic polynucleotide"
atggctgccgatggttatcttccagattggctcgaggacaacctctctgagggcattcgcgagtggtgggcgctgaaacctggagccccgaagcccaaagccaaccagcaaaagcaggacgacggccggggtctggtgcttcctggctacaagtacctcggacccttcaacggactcgacaagggggggcccgtcaacgcggcggacgcagcggccctcgagcacgacaaggcctacgaccagcagctgcaggcgggtgacaatccgtacctgcggtataaccacgccgacgccgagtttcaggagcgtctgcaagaagatacgtcttttgggggcaacctcgggcgagcagtcttccaggccaagaagcgggttctcgaacctctcggtctggttgaggaaggcgctaagacggctcctggaaagaagagaccggtagagccatcaccccagcgttctccagactcctctacgggcatcggcaagaaaggccaacagcccgccagaaaaagactcaattttggtcagactggcgactcagagtcagttccagaccctcaacctctcggagaacctccagcagcgccctctggtgtgggacctaatacaatggctgcaggcggtggcgcaccaatggcagacaataacgaaggcgccgacggagtgggtagttcctcgggaaattggcattgcgattccacatggctgggcgacagagtcatcaccaccagcacccgaacctgggccctgcccacctacaacaaccacctctacaagcaaatctccaacgggacatcgggaggagccaccaacgacaacacctacttcggctacagcaccccctgggggtattttgactttaacagattccactgccacttttcaccacgtgactggcagcgactcatcaacaacaactggggattccggcccaagagactcagcttcaagctcttcaacatccaggtcaaggaggtcacgcagaatgaaggcaccaagaccatcgccaataacctcaccagcaccatccaggtgtttacggactcggagtaccagctgccgtacgttctcggctctgcccaccagggctgcctgcctccgttcccggcggacgtgttcatgattccccagtacggctacctaacactcaacaacggtagtcaggccgtgggacgctcctccttctactgcctggaatactttccttcgcagatgctgagaaccggcaacaacttccagtttacttacaccttcgaggacgtgcctttccacagcagctacgcccacagccagagcttggaccggctgatgaatcctctgattgaccagtacctgtactacttgtctcggactcaaacaacaggaggcacggcaaatacgcagactctgggcttcagccaaggtgggcctaatacaatggccaatcaggcaaagaactggctgccaggaccctgttaccgccaacaacgcgtctcaacgacaaccgggcaaaacaacaatagcaactttgcctggactgctgggaccaaataccatctgaatggaagaaattcattggctaatcctggcatcgctatggcaacacacaaagacgacgaggagcgtttttttcccagtaacgggatcctgatttttggcaaacaaaatgctgccagagacaatgcggattacagcgatgtcatgctcaccagcgaggaagaaatcaaaaccactaaccctgtggctacagaggaatacggtatcgtggcagataacttgcagcagcaaaacacggctcctcaaattggaactgtcaacagccagggggccttacccggtatggtctggcagaaccgggacgtgtacctgcagggtcccatctgggccaagattcctcacacggacggcaacttccacccgtctccgctgatgggcggctttggcctgaaacatcctccgcctcagatcctgatcaagaacacgcctgtacctgcggatcctccgaccaccttcaaccagtcaaagctgaactctttcatcacgcaatacagcaccggacaggtcagcgtggaaattgaatgggagctgcagaaggaaaacagcaagcgctggaaccccgagatccagtacacctccaactactacaaatctacaagtgtggactttgctgttaatacagaaggcgtgtactctgaaccccgccccattggcacccgttacctcacccgtaatctgtaa

SEQ ID NO: 3994 - DNA, 2217 bp, Artificial Sequence
  source: /note="Description of Artificial Sequence: Synthetic polynucleotide"
atggctgccgatggttatcttccagattggctcgaggacaacctctctgagggcattcgcgagtggtgggcgctgaaacctggagccccgaagcccaaagccaaccagcaaaagcaggacgacggccggggtctggtgcttcctggctacaagtacctcggacccttcaacggactcgacaagggggagcccgtcaacgcggcggacgcagcggccctcgagcacgacaaggcctacgaccagcagctgcaggcgggtgacaatccgtacctgcggtataaccacgccgacgccgagtttcaggagcgtctgcaagaagatacgtcttttgggggcaacctcgggcgagcagtcttccaggccaagaagcgggttctcgaacctctcggtctggttgaggaaggcgctaagacggctcctggaaagaagagaccggtagagccatcaccccagcgttctccagactcctctacgggcatcggcaagaaaggccaacagcccgccagaaaaagactcaattttggtcagactggcgactcagagtcagttccagaccctcaacctctcggagaacctccagcagcgccctctggtgtgggacctaatacaatggctgcaggcggtggcgcaccaatggcagacaataacgaaggcgccgacggagtgggtagttcctcgggaaattggcattgcgattccacatggctgggcgacagagtcatcaccaccagcacccgaacctgggccctgcccacctacaacaaccacctctacaggcaaatctccaacgggacatcgggaggagccaccaacgacaacacctacttcggctacagcaccccctgggggtattttgactttaacagattccactgccacttttcaccacgtgactggcagcgactcatcaacaacaactggggattccggcccaagagactcagcttcaagctcttcaacatccaggtcaaggaggtcacgcagaatgaaggcaccaagaccatcgccaataacctcaccagcaccatccaggtgtttacggactcggagtaccagctgccgtacgttctcggctctgcccaccagggctgcctgcctccgttcccggcggacgtgttcatgattccccagtacggctacctaacactcaacaacggtagtcaggccgtgggacgctcctccttctactgcctggaatactttccttcgcagatgctgagaaccggcaacaacttccagtttacttacaccttcgaggacgtgcctttccacagcagctacgcccacagccagagcttggaccggctgatgaatcctctgattgaccagtacctgtactacttgtctcggactcaaacaacaggaggcacggcaaatacgcagactctgggcttcagccaaggtgggcctaatacaatggccaatcaggcaaagaactggctgccaggaccctgttaccgccaacaacgcgtctcaacgacaaccgggcaaaacaacaatagcaactttgcctggactgctgggaccaaataccatctgaatggaagaaattcattggctaatcctggcatcgctatggcaacacacaaagacgacgaggagcgtttttttcccagtaacgggatcctgatttttggcaaacaaaatgctgccagagacaatgcggattacagcgatgtcatgctcaccagcgaggaagaaatcaaaaccactaaccctgtggctacagaggaatacggtatcgtggcagataacttgcagcagcaaaacacggctcctcaaattggaactgtcaacagccagggggccttacccggtatggtctggcagaaccgggacgtgtacctgcagggtcccatctgggccaagattcctcacacggacggcaacttccacccgtctccgctgatgggcggctttggcctgaaacatcctccgcctcagatcctgatcaagaacacgcctgtacctgcggatcctccgaccaccttcaaccagtcaaagctgaactctttcatcacgcaatacagcaccggacaggtcagcgtggaaattgaatgggagctgcagaaggaaaacagcaagcgctggaaccccgagatccagtacacctccaactactacaaatctacaagtgtggactttgctgttaatacagaaggcgtgtactctgaaccccgccccattggcacccgttacctcacccgtaatctgtaa

SEQ ID NO: 3995 - DNA, 2217 bp, Artificial Sequence
  source: /note="Description of Artificial Sequence: Synthetic polynucleotide"
atggctgccgatggttatcttccagattggctcgaggacaacctctctgagggcattcgcgagtggtgggcgctgaaacctggagccccgaagcccaaagccaaccagcaaaagcaggacgacggccggggtctggtgcttcctggctacaagtacctcggacccttcaacggactcgacaagggggagcccgtcaacgcggcggacgcagcggccctcgagcacgacaaggcctacgaccagcagctgcaggcgggtgacaatccgtacctgcggtataaccacgccgacgccgagttccaggagcgtctgcaagaagatacgtcttttgggggcaacctcgggcgagcagtcttccaggccaagaagcgggttctcgaacctctcggtctggttgaggaaggcgctaagacggctcctggaaagaagagaccggtagagccatcaccccagcgttctccagactcctctacgggcatcggcaagaaaggccaacagcccgccagaaaaagactcaattttggtcagactggcgactcagagtcagttccagaccctcaacctctcggagaacctccagcagcgccctctggtgtgggacctaatacaatggctgcaggcggtggcgcaccaatggcagacagtaacgaaggcgccgacggagtgggtagttcctcgggaaattggcattgcgattccacatggctgggcgacagagtcatcaccaccagcacccgaacctgggccctgcccacctacaacaaccacctctacaagcaaatctccaacgggacatcgggaggagccaccaacgacaacacctacttcggctacagcaccccctgggggtattttgactttaacagattccactgccacttttcaccacgtgactggcagcgactcatcaacaacaactggggattccggcccaagagactcagcttcaagctcttcaacatccaggtcaaggaggtcacgcagaatgaaggcaccaagaccatcgccaataacctcaccagcaccatccaggtgtttacggactcggagtaccagctgccgtacgttctcggctctgcccaccagggctgcctgcctccgttcccggcggacgtgttcatgattccccagtacggctacctaacactcaacaacggtagtcaggccgtgggacgctcctccttctactgcctggaatactttccttcgcagatgctgagaaccggcaacaacttccagtttacttacaccttcgaggacgtgcctttccacagcagctacgcccacagccagagcttggaccggctgatgaatcctctgattgaccagtacctgtactacttgtctcggactcaaacaacaggaggcacggcaaatacgcagactctgggcttcagccaaggtgggcctaatacaatggccaatcaggcaaagaactggctgccaggaccctgttaccgccaacaacgcgtctcaacgacaaccgggcaaaacaacaatagcaactttgcctggactgctgggaccaaataccatctgaatggaagaaattcattggctaatcctggcatcgctatggcaacacacaaagacgacgaggagcgtttttttcccagtaacgggatcctgatttttggcaaacaaaatgctgccagagacaatgcggattacagcgatgtcatgctcaccagcgaggaagaaatcaaaaccactaaccctgtggctacagaggaatacggtatcgtggcagataacttgcagcagcaaaacacggctcctcaaattggaactgtcaacagccagggggccttacccggtatggtctggcagaaccgggacgtgtacctgcagggtcccatctgggccaagattcctcacacggacggcaacttccacccgtctccgctgatgggcggctttggcctgaaacatcctccgcctcagatcctgatcaagaacacgcctgtacctgcggatcctccgaccaccttcaaccagtcaaagctgaactctttcatcacgcaatacagcaccggacaggtcagcgtggaaattgaatgggagctgcagaaggaaaacagcaagcgctggaaccccgagatccagtacacctccaactactacaaatctacaagtgtggactttgctgttaatacagaaggcgtgtactctgaaccccgccccattggcacccgttacctcacccgtaatctgtaa

SEQ ID NO: 3996 - DNA, 2217 bp, Artificial Sequence
  source: /note="Description of Artificial Sequence: Synthetic polynucleotide"
atggctgccgatggttatcttccagattggctcgaggacaacctctctgagggcattcgcgagtggtgggcgctgaaacctggagccccgaagcccaaagccaaccagcaaaagcaggacgacggccggggtctggtgcttcctggctacaagtacctcggacccttcaacggactcgacaagggggagcccgtcaacgcggcggacgcagcggccctcgagcacgacaaggcctacgaccagcagctgcaggcgggtgacaatccgtacctgcggtataaccacgccgacgccgagtttcaggagcgtctgcaagaagatacgtcttttgggggcaacctcgggcgagcagtcttccaggccaagaagcgagttctcgaacctctcggtctggttgaggaaggcgctaagacggctcctggaaagaagagaccggtagagccatcaccccagcgttctccagactcctctacgggcatcggcaagaaaggccaacagcccgccagaaaaagactcaattttggtcagactggcgactcagagtcagttccagaccctcaacctctcggagaacctccagcagcgccctctggtgtgggacctaatacaatggctgcaggcggtggcgcaccaatggcagacaataacgaaggcgccgacggagtgggtagttcctcgggaaattggcattgcgattccacatggctgggcgacagagtcatcaccaccagcacccgaacctgggccctgcccacctacaacaaccacctctacaagcaaatctccaacgggacgtcgggaggagccaccaacgacaacacctacttcggctacagcaccccctgggggtattttgactttaacagattccactgccacttttcaccacgtgactggcagcgactcatcaacaacaactggggattccggcccaagagactcagcttcaagctcttcaacatccaggtcaaggaggtcacgcagaatgaaggcaccaagaccatcgccaataacctcaccagcaccatccaggtgtttacggactcggagtaccagctgccgtacgttctcggctctgcccaccagggctgcctgcctccgttcccggcggacgtgttcatgattccccagtacggctacctaacactcaacaacggtagtcaggccatgggacgctcctccttctactgcctggaatactttccttcgcagatgctgagaaccggcaacaacttccagtttacttacaccttcgaggacgtgcctttccacagcagctacgcccacagccagagcttggaccggctgatgaatcctctgattgaccagtacctgtactacttgtctcggactcaagcaacaggaggcacggcaaatacgcagactctgggcttcagccaaggtgggcctaatacaatggccaatcaggcaaagaactggctgccaggaccctgttaccgccaacaacgcgtctcaacgacaaccgggcaaaacaacaatagcaactttgcctggactgctgggaccaaataccatctgaatggaagaaattcattggctaatcctggcatcgctatggcaacacacaaagacgacgaggagcgtttttttcccagtaacgggatcctgatttttggcaaacaaaatgctgccagagacaatgcggattacagcgatgtcatgctcaccagcgaggaagaaatcaaaaccactaaccctgtggctacagaggaatacggtatcgtggcagataacttgcagcagcaaaacacggctcctcaaattggaactgtcaacagccagggggccttacccggtatggtctggcagaaccgggacgtgtacctgcagggtcccatctgggccaagattcctcacacggacggcaacttccacccgtctccgctgatgggcggctttggcctgaaacatcctccgcctcagatcctgatcaagaacacgcctgtacctgcggatcctccgaccaccttcaaccagtcaaagctgaactctttcatcacgcaatacagcaccggacaggtcagcgtggaaattgaatgggagctgcagaaggaaaacagcaagcgctggaaccccgagatccagtacacctccaactactacaaatctacaagtgtggactttgctgttaatacagaaggcgtgtactctgaaccccgccccattggcacccgttacctcacccgtaatctgtaa

SEQ ID NO: 3997 - DNA, 2217 bp, Artificial Sequence
  source: /note="Description of Artificial Sequence: Synthetic polynucleotide"
atggctgccgatggttatcttccagattggctcgaggacaacctctctgagggcattcgcgagtggtgggcgctgaaacctggagccccgaagcccaaagccaaccagcaaaagcaggacgacggccggggtctggtgcttcctggctacaagtacctcggacccttcaacggactcgacaagggggagcccgtcaacgcggcggacgcagcggccctcgagcacgacaaggcctacgaccagcagctgcaggcgggtaacaatccgtacctgcggtataaccacgccgacgccgagtttcaggagcgtctgcaagaagatacgtcttttgggggcaacctcgggcgagcagtcttccaggccaagaagcgggttctcggacctctcggtctggttgaggaaggcgctaagacggctcctggaaagaagagaccggtagagccatcaccccagcgttctccagactcctctacgggcatcggcaagaaaggccaacagcccgccagaaaaagactcaattttggtcagactggcgactcagagtcagttccagaccctcaacctctcggagaacctccagcagcgccctctggtgtgggacctaatacaatggctgcaggcggtggcgcaccaatggcagacaataacgaaggcgccgacggagtgggtagttcctcgggaaattggcattgcgattccacatggctgggcgacagagtcatcaccaccagcacccgaacctgggccctgcccacctacaacaaccacctctacaagcaaatctccaacgggacatcgggaggagccaccaacgacaacacctacttcggctacagcaccccctgggggtattttgactttaacagattccactgccacttttcaccacgtgactggcagcgactcatcaacaacaactggggattccggcccaagagactcagcttcaagctcttcaacatccaggtcaaggaggtcacgcagaatgaaggcaccaagaccatcgccaataacctcaccagcaccatccaggtgtttacggactcggagtaccagctgccgtacgttctcggctctgcccaccagggctgcctgcctccgttcccggcggacgtgttcatgattccccagtacggctacctaacactcaacaacggtagtcgggccgtgggacgctcctccttctactgcctggaatactttccttcgcagatgctgagaaccggcaacaacttccagtttacttacaccttcgaggacgtgcctttccacagcagctacgcccacagccagagcttggaccggctgatgaatcctctgattgaccagtacctgtactacttgtctcggactcaaacaacaggaggcacggcaaatacgcagactctgggcttcagccaaggtgggcctaatacaatggccaatcaggcaaagaactggctgccaggaccctgttaccgccaacaacgcgtctcaacgacaaccgggcaaaacaacaatagcaactttgcctggactgctgggaccaaataccatctgaatggaagaaattcattggctaatcctggcatcgctatggcaacacacaaagacgacgaggagcgtttttttcccagtaacgggatcctgatttttggcaaacaaaatgctgccagagacaatgcggattacagcgatgtcatgctcaccagcgaggaagaaatcaaaaccactaaccctgtggctacagaggaatacggtatcgtggcagataacttgcagcagcaaaacacggctcctcaaattggaactgtcaacagccagggggccttacccggtatggtctggcagaaccgggacgtgtacctgcagggtcccatctgggccaagattcctcacacggacggcaacttccacccgtctccgctgatgggcggctttggcctgaaacatcctccgcctcagatcctgatcaagaacacgcctgtacctgcggatcctccgaccaccttcaaccagtcaaagctgaactctttcatcacgcaatacagcaccggacaggtcagcgtggaaattgaatgggagctgcagaaggaaaacagcaagcgctggaaccccgagatccagtacacctccaactactacaaatctacaagtgtggactttgctgttaatacagaaggcgtgtactctgaaccccgccccattggcacccgttacctcacccgtaatctgtaa

SEQ ID NO: 3998 - DNA, 2217 bp, Artificial Sequence
  source: /note="Description of Artificial Sequence: Synthetic polynucleotide"
atggctgccgatggttatcttccagattggctcgaggacaacctctctgagggcattcgcgagtggtgggcgctgaaacctggagccccgaagcccaaagccaaccagcaaaagcaggacgacggccggggtctggtgcttcctggctacaagtacctcggacccttcaacggactcgacaagggggagcccgtcaacgcggcggacgcagcggccctcgagcacgacaaggcctacgaccagcagctgcaggcgggtgacaatccgtacctgcggtataaccacgccgacgccgagtttcaggagcgtctgcaagaagatacgtcttttgggggcaacctcgggcgagcagtcttccaggccaagaagcgggttctcgaacctctcggtctggttgaggaaggcgctaagacggctcctggaaagaagagaccggtagagccatcaccccagcgttctccagactcctctacgggcatcggcaagaaaggccaacagcccgccagaaaaagactcaattttggtcagactggcgactcagagtcagttccagaccctcaacctctcggagaacctccagcagcgccctctggtgtgggacctaatacaatggctgcaggcggtggcgcaccaatggcagacaataacgaaggcgccgacggagtgggtagttcctcgggaaattggcattgcgattccacatggctgggcgacagagtcatcaccaccagcacccgaacctgggccctgcccacctacaacaaccacctctacaagcaaatctccaacgggacatcgggaggagccaccaacgacaacacctacttcggctacagcaccccctgggggtattttgactttaacagattccactgccacttttcaccacgcgactggcagcgactcatcaacaacaactggggattccggcccaagagactcagcttcaagctcttcaacatccaggtcaaggaggtcacgcagaatgaaggcaccaagaccatcgccaataacctcaccagcaccatccaggtgtttacggactcggagtaccagctgccgtacgttctcggctctgcccaccagggctgcctgcctccgttcccggcggacgtgttcatgattccccagtacggctacctaacactcaacaacggtagtcaggccgtgggacgctcctccttctactgcctggaatactttccttcgcagatgctgagaaccggcaacaacttccagtttacttacaccttcgaggacgtgcctttccacagcagctacgcccacagccagagcttggaccggctgatgaatcctctgattgaccagtacctgtactacttgtctcggactcaaacaacaggaggcacggcaaatacgcagactctgggcttcagccaaggtgggcctaatacaatggccaatcaggcaaagaactggctgccaggaccctgttaccgccaacaacgcgtctcaacgacaaccgggcaaaacaacaatagcgactttgcctggactgctgggaccaaataccatctgaatggaagaaattcattggctaatcctggcatcgctatggcaacacacaaagacgacgaggagcgtttttttcccagtaacgggatcctgatttttggcaaacaaaatgctgccagagacaatgcggattacagcgatgtcatgctcaccagcgaggaagaaatcaaaaccactaaccctgtggctacagaggaatacggtatcgtggcagataacttgcagcagcaaaacacggctcctcaaattggaactgtcaacagccagggggccttacccggtatggtctggcagaaccgggacgtgtacctgcagggtcccgtctgggccaagattcctcacacggacggcaacttccacccgtctccgctgatgggcggctttggcctgaaacatcctccgcctcagatcctgatcaagaacacgcctgtacctgcggatcctccgaccaccttcaaccagtcaaagctgaactctttcatcacgcaatacagcaccggacaggtcagcgtggaaattgaatgggagctgcagaaggaaaacagcaagcgctggaaccccgagatccagtacacctccaactactacaaatctacaagtgtggactttgctgttaatacagaaggcgtgtactctgaaccccgccccattggcacccgttacctcacccgtaatctgtaa

SEQ ID NO: 3999 - DNA, 2217 bp, Artificial Sequence
  source: /note="Description of Artificial Sequence: Synthetic polynucleotide"
atggctgccgatggttatcttccagattggctcgaggacaacctctctgagggcattcgcgagtggtgggcgctgaaacctggagccccgaagcccaaagccaaccagcaaaagcaggacgacggccggggtctggtgcttcctggctacaagtacctcggacccttcaacggactcgacaagggggagcccgtcaacgcggcggacgcagcggccctcgagcacgacaaggcctacgaccagcagctgcaggcgggtgacaatccgtacctgcggtataaccacgccgacgccgagtttcaggagcgtctgcaagaagatacgtcttttgggggcagcctcgggcgagcagtcttccaggccaagaagcgggttctcgaacctctcggtctggttgaggaaggcgctaagacggctcctggaaagaagagaccggtagagccatcaccccagcgttctccagactcctctacgggcatcggcaagaaaggccaacagcccgccagaaaaagactcaattttggtcagactggcgactcagagtcagttccagaccctcaacctctcggagaacctccagcagcgccctctggtgtgggacctaatacaatggctgcaggcggtggcgcaccaatggcagacaataacgaaggcgccgacggagtgggtagttcctcgggaaattggcattgcgattccacatggctgggcgacagagtcatcaccaccagcacccgaacctgggccctgcccacctacaacaaccacctctacaagcaaatctccaacgggacatcgggaggagccaccaacgacaacacctacttcggctacagcaccccctgggggtattttgactttaacagattccactgccacttttcaccacgtgactggcagcgactcatcaacaacaactggggattccggcccaagagactcagcttcaagctcttcaacatccaggtcaaggaggtcacgcagaatgaaggcaccaagaccatcgccaataacctcaccagcaccatccaggtgtttacggactcggagtaccagctgccgtacgttctcggctctgcccaccagggctgcctgcctccgttcccggcggacgtgttcatgattccccagtacggctacctaacactcaacaacggtagtcaggccgtgggacgctcctccttctactgcctggaatactttccttcgcagatgctgagaaccggcaacaacttccagtttacttacaccttcgaggacgtgcctttccacagcagctacgcccacagccagagcttggaccggctgatgaatcctctgattgaccagtacctgtactacttgtctcggactcaaacaacaggaggcacggcaaatacgcagaccctgggcttcagccaaggtgggcctaatacaatggccaatcaggcaaagaactggctgccaggaccctgttaccgccaacaacgcgtctcaacgacaaccgggcaaaacaacaatagcaactttgcctggactgctgggaccaaataccatctgaatggaagaaattcattggctaatcctggcatcgctatggcaacacacaaagacgacgaggagcgtttttttcccagtaacgggatcctgatttttggcaagcaaaatgctgccagagacaatgcggattacagcgatgtcatgctcaccagcgaggaagaaatcaaaaccactaaccctgtggctacagaggaatacggtatcgtggcagataacttgcagcagcaaaacacggctcctcaaattggaactgtcaacagccagggggccttacccggtatggtctggcagaaccgggacgtgtacctgcagggtcccatctgggccaagattcctcacacggacggcaacttccacccgtctccgctgatgggcggctttggcctaaaacatcctccgcctcagatcctgatcaagaacacgcctgtacctgcggatcctccgaccaccttcaaccagtcaaagctgaactctttcatcacgcaatacagcaccggacaggtcagcgtggaaattgaatgggagctgcagaaggaaaacagcaagcgctggaaccccgagatccagtacacctccaactactacaaatctacaagtgtggactttgctgttaatacagaaggcgtgtactctgaaccccgccccattggcacccgttacctcacccgtaatctgtaa

SEQ ID NO: 4000 - DNA, 2217 bp, Artificial Sequence
  source: /note="Description of Artificial Sequence: Synthetic polynucleotide"
atggctgccgatggttatcttccagattggctcgaggacaacctctctgagggcattcgcgagtggtgggcgctgaaacctggagccccgaagcccaaagccaaccagcaaaagcaggacgacggccggggtctggtgcttcctggctacaagtacctcggacccttcaacggactcgacaagggggagcccgtcaacgcggcggacgcagcggccctcgagcacgacaaggcctacgaccagcagctgcaggcgggtgacaatccgtaccagcggtataaccacgccgacgccgagtttcaggagcgtctgcaagaagatacgtcttttgggggcaacctcgggcgagcagtcttccaggccaagaagcgggttctcgaacctctcggtctggttgaggaaggcgctaagacggctcctggaaagaagagaccggtagagccatcaccccagcgttctccagactcctctacgggcatcggcaagaaaggccaacagcccgccagaaaaagactcaattttggtcagactggcgactcagagtcagttccagaccctcaacctctcggagaacctccagcagcgccctctggtgtgggacctaatacaatggctgcaggcggtggcgcaccaatggcagacaataacgaaggcgccgacggagtgggtagttcctcgggaaattggcattgcgattccgcatggctgggcgacagagtcatcaccaccagcacccgaacctgggccctgcccacctacaacaaccacctctacaagcaaatctccaacgggacatcgggaggagccaccaacgacaacacctacttcggctacagcaccccctgggggtattttgactttaacagattccactgccacttttcaccacgtgactggcagcgactcatcaacaacaactggggattccggcccaagagactcagcttcaagctcttcaacatccaggtcaaggaggtcacgcagaatgaaggcaccaagaccatcgccaataacctcaccagcaccatccaggtgtttacggactcggagtaccagctgccgtacgttctcggctctgcccaccagggctgcctgcctccgttcccggcggacgtgttcacgattccccagtacggctacctaacactcaacaacggtagtcaggccgtgggacgctcctccttctactgcctggaatactttccttcgcagatgctgagaaccggcaacaacttccagtttacttacaccttcgaggacgtgcctttccacagcagctacgcccacagccagagcttggaccggctgatgaatcctctgattgaccagtacctgtactacttgtctcggactcaaacaacaggaggcacggcaaatacgcagactctgggcttcagccaaggtgggcctaatacaatggccaatcaggcaaagaactggctgccaggaccctgttaccgccaacaacgcgtctcaacgacaaccgggcaaaacaacaatagcaactttgcctggactgctgggaccaaataccatctgaatggaagaaattcattggctaatcctggcatcgctatggcaacacacaaagacgacgaggagcgtttttttcccagtaacgggatcctgatttttggcaaacaaaatgctgccagagacaatgcggattacagcgatgtcatgctcaccagcgaggaagaaatcaaaaccactaaccctgtggctacagaggaatacggtatcgtggcagataacttgcagcagcaaaacacggctcctcaaattggaactgtcaacagccagggggccttacccggtatggtctggcagaaccgggacgtgtacctgcagggtcccatctgggccaagattcctcacacggacggcaacttccacccgtctccgctgatgggcggctttggcctgaaacatcctccgcctcagatcctgatcaagaacacgcctgtacctgcggatcctccgaccaccttcaaccagtcaaagctgaactctttcatcacgcaatacagcaccggacaggtcagcgtggaaattgaatgggagctgcagaaggaaaacagcaagcgctggaaccccgagatccagtacacctccaactactacaaatctacaagtgtggactttgctgttaatacagaaggcgtgtactctgaaccccgccccattggcacccgttacctcacccgtaatctgtaa

SEQ ID NO: 4001 - DNA, 2217 bp, Artificial Sequence
  source: /note="Description of Artificial Sequence: Synthetic polynucleotide"
atggctgccgatggttatcttccagattggctcgaggacaacctctctgagggcattcgcgagtggtgggcgctgaaacctggagccccgaagcccaaagccaaccagcaaaagcaggacgacggccggggtctggtgcttcctggctacaagtacctcggacccttcaacggactcgacaagggggagcccgtcaacgcggcggacacggcggccctcgagcacgacaaggcctacgaccagcagctgcaggcgggtgacaatccgtacctgcggtataaccacgccgacgccgagtttcaggagcgtctgcaagaagatacgtcttttgggggcaacctcgggcgagcagtcttccaggccaagaagcgggttctcgaacctctcggtctggttgaggaaggcgctaagacggctcctggaaagaagagaccggtagagccatcaccccagcgttctccagactcctctacgggcatcggcaagaaaggccaacagcccgccagaaaaagactcaattttggtcagactggcgactcagagtcagttccagaccctcaacctctcggagaacctccagcagcgccctctggtgtgggacctaatacaatggctgcaggcggtggcgcaccaatggcagacaataacgaaggcgccgacggagtgggtagttcctcgggaaattggcattgcgattccacatggctgggcgacagagtcatcaccaccagcacccgaacctgggccctgcccacctacaacaaccacctctacaagcaaatctccaacgggacatcgggaggagccaccaacgacaacacctacttcggctacagcaccccctgggggtattttgactttaacagattccactgccacttttcaccacgtgactggcagcgactcatcaacaacaactggggattccggcccaagagactcagcttcaagctcttcaacatccaggtcaaggaggtcacgcagaatgaaggcaccaagaccatcgccaataacctcaccagcaccatccaggtgtttacggactcggagtaccagctgccgtacgttctcggctctgcccaccagggctgcctgcctccgttcccggcggacgtgttcatgattccccagtacggctacctaacactcaacaacggtagtcaggccgtgggacgctcctccttctactgcctggaatactttccttcgcagatgctgagaaccggcaacaacttccagtttacttacaccttcgaggacgtgcctttccacagcagctacgcccacagccagagcttggaccggctgatgaatcctctgattgaccagtacctgtactacttgtctcggactcaaacaacaggaggcacggcaaatacgcagactctgggcttcagccaaggtgggcctaatacaatggccaatcaggcaaagaactggctgccaggaccctgttaccgccaacaacgcgtctcaacgacaaccgggcaaaacaacaatagcaactttgcctggactgctgggaccaaataccatctgaatggaagaaattcattggctaatcctggcatcgctatggcaacacacaaagacgacgaggagcgtttttttcccagtaacgggatcctgatttttggcaaacaaaatgctgccagagacaatgcggattacagcgatgtcatgctcaccagcgaggaagaaatcaaaaccactaaccctgtggctacagaggaatacggtatcgtggcagataacttgcagcagcaaaacacggctcctcaaattggaactgtcaacagccagggggccttacccggtatggtctggcagaaccgggacgtgtacctgcagggtcccatctgggccaagattcctcacacggacggcaacttccacccgtctccgctgatgggcggctttggcctgaaacatcctccgcctcagatcctgatcaagaacacgcctgtacctgcggatcctccgaccaccttcaaccagtcaaagctgaactctttcatcacgcaatacagcaccggacaggtcagcgtggaaattgaatgggagctgcagaaggaaaacagcaagcgctggaaccccgagatccagtacacctccaactactacaaatctacaagtgtggactttgctgttaatacagaaggcgtgtactctgaaccccgccccattggcacccgttacctcacccgtaatctgtaa

SEQ ID NO: 4002 - DNA, 2217 bp, Artificial Sequence
  source: /note="Description of Artificial Sequence: Synthetic polynucleotide"
atggctgccgatggttatcttccagattggctcgaggacaacctctctgagggcattcgcgagtggtgggcgctgaaacctggagccccgaagcccaaagccaaccagcaaaagcaggacgacggccggggtctggtgcttcctggctacaagtacctcggacccttcaacggactcgacaagggggagcccgtcaacgcggcggacgcagcggccctcgagcacgacaaggcctacgaccagcagctgcaggcgggtgacaatccgtacctgcggtataaccacgccgacgccgagtttcaggagcgtctgcaagaagatacgtcttttgggggcaacctcgggcgagcagtcttccaggccaagaagcgggttctcgaacctctcggtctggttgaggaaggcgctaagacggctcctggaaagaagagaccggtagagccatcaccccagcgttctccagactcctctacgggcatcggcaagaaaggccaacagcccgccagaaaaagactcaattttggtcagactggcgactcagagtcagttccagaccctcaacctctcggagaacctccagcagcgccctctggtgtgggacctaatacaatggctgcaggcggtggcgcaccaatggcagacaataacgagggcgccgacggagtgggtagttcctcgggaaattggcattgcgattccacatggctgggcgacagagtcatcaccaccagcacccgaacctgggccctgcccacctacaacaaccacctctacaagcaaatctccaacgggacatcgggaggagccaccaacgacaacacctacttcggctacagcaccccctgggggtattttgactttaacagattccactgccacttttcaccacgtgactggcagcgactcatcaacaacaactggggattccggcccaagagactcagcttcaagctcttcaacatccaggtcaaggaggtcacgcagaatgaaggcaccaagaccatcgccaataacctcaccagcaccatccaggtgtttacggactcggagtaccagctgccgtacgttctcggctctgcccaccagggctgcctgcctccgttcccggcggacgtgttcatgattccccagtacggctacctgacactcaacaacggtagtcaggccgtgggacgctcctccttctactgcctggaatactttccttcgcagatgctgagaaccggcaacaacttccagtttacttacaccttcgaggacgtgcctttccacagcagctacgcccacagccagagcttggaccggctgatgaatcctctgattgaccagtacctgtactacttgtctcggactcaaacaacaggaggcacggcaaatacgcagactctgggcttcagccaaggtgggcctaatacaatggccaatcaggcaaagaactggctgccaggaccctgttaccgccaacaacgcgtctcaacgacaaccgggcaaaacaacaatagcaactttgcctggactgctgggaccaaataccatctgaatggaagaaattcattggctaatcctggcatcgctatggcaacacacaaagacgacgaggagcgtttttttcccagtaacgggatcctgatttttggcaaacaaaatgctgccagagacaatgcggattacagcgatgtcatgctcaccagcgaggaagaaatcaaaaccactaaccctgtggctacagaggaatacggtatcgtggcagataacttgcagcagcaaaacgcggctcctcaaattggaactgtcaacagccagggggccttacccggtatggtctggcagaaccgggacgtgtacctgcagggtcccatctgggccaagattcctcacacggacggcaacttccacccgtctccgctgatgggcggctttggcctgaaacatcctccgcctcagatcctgatcaagaacacgcctgtacctgcggatcccccgaccaccttcaaccagtcaaagctgaactctttcatcacgcaatacagcaccggacaggtcagcgtggaaattgaatgggagctgcagaaggaaaacagcaagcgctggaaccccgagatccagtacacctccaactactacaaatctacaagtgtggactttgctgttaatacagaaggcgtgtactctgaaccccgccccattggcacccgttacctcacccgtaatctgtaa

SEQ ID NO: 4003 - DNA, 2217 bp, Artificial Sequence
  source: /note="Description of Artificial Sequence: Synthetic polynucleotide"
atggctgccgatggttatcttccagattggctcgaggacaacctctctgagggcattcgcgagtggtgggcgctgaaacctggagccccgaagcccaaagccaaccagcaaaagcaggacgacggccggggtctggtgcttcctggctacaagtacctcggacccttcaacggactcgacaagggggagcccgtcaacgcggcggacgcagcggccctcgagcacgacaaggcctacgaccagcagctgcaggcgggtgacaatccgtacctgcggtataaccacgccgacgccgagtttcaggagcgtctgcaagaagatacgtcttttgggggcaacctcgggcgagcagtcttccaggccaagaagcgggttctcgaacctctcggtctggttgaggaaggcgctaagacggctcctggaaagaagagaccggtagagccatcaccccagcgttctccagactcctctacgggcatcggcaagaaaggccaacagcccgccagaaaaagactcaattttggtcagactggcgactcagagtcagttccagaccctcaacctctcggagaacctccagcagcgccctctggtgtgggacctaatacaatggctgcaggcggtggcgcaccaatggcagacaataacgaaggcgccgacggagtgggtagttcctcgggaaattggcattgcgattccacatggctgggcgacagagtcatcaccaccagcacccgaacctgggccctgcccacctacaacaaccacctctacaagcaaatctccaacgggacatcgggaggagccaccaacgacaacacctacttcggctacagcaccccctgggggtattttgactttaacagattccactgccacttttcaccacgtgactggcagcgactcatcaacaacaactggggattccggcccaagagactcagcttcaagctcttcaacatccaggtcaaggaggtcacgcagaatgaaggcaccaagaccatcgccaataacctcaccagcaccatccaggtgtttacggactcggagtaccagctgccgtacgttctcggctctgcccaccagggctgcctgcctccgttcccggcggacgtgttcacgattccccagtacggctacctaacactcaacaacggtagtcaggccgtgggacgctcctccttctactgcctggaatactttccttcgcagatgctgagaaccggcaacaacttccagtttacttacaccttcgaggacgtgcctttccacagcagctacgcccacagccagagcttggaccggctgatgaatcctctgattgaccagtacctgtactacttgtctcggactcaaacaacaggaggcacggcaaatacgcagactctgggcttcagccaaggtgggcctaatacaatggccaatcaggcaaagaactggctgccaggaccctgttaccgccaacaacgcgtctcaacgacaaccgggcgaaacaacaatagcaactttgcctggactgctgggaccaaataccatctgaatggaagaaattcattggctaatcctggcatcgctatggcaacacacaaagacgacgaggagcgtttttttcccagtaacgggatcctgatttttggcaaacaaaatgctgccagagacaatgcggattacagcgatgtcatgctcaccagcgaggaagaaatcaaaaccactaaccctgtggctacagaggaatacggtatcgtggcagataacttgcagcagcaaaacacggctcctcaaattggaactgtcaacagccagggggccttacccggtatggtctggcagaaccgggacgtgtacctgcagggtcccatctgggccaagattcctcacacggacggcaacttccacccgtctccgctgatgggcggctttggcctgaaacatcctccgcctcagatcctgatcaagaacacgcctgtacctgcggatcctccgaccaccttcaaccagtcaaagctgaactctttcatcacgcaatacagcaccggacaggtcagcgtggaaattgaatgggagctgcagaaggaaaacagcaagcgctggaaccccgagatccagtacacctccaactactacaaatctacaagtgtggactttgctgttaatacagaaggcgtgtactctgaaccccgccccattggcacccgttacctcacccgtaatctgtaa

SEQ ID NO: 4004 - DNA, 2217 bp, Artificial Sequence
  source: /note="Description of Artificial Sequence: Synthetic polynucleotide"
atggctgccgatggttatcttccagattggctcgaggacaacctctctgagggcattcgcgagtggtgggcgctgaaacctggagccccgaagcccaaagccaaccagcaaaagcaggacgacggccggggtctggtgcttcctggctacaagtacctcggacccttcaacggactcgacaagggggagcccgtcaacgcggcggacgcagcggccctcgagcacgacaaggcctacgaccagcagctgcaggcgggtgacaatccgtacctgcggtataaccacgccgacgccgagtttcaggagcgtctgcaagaagatacgtcttttgggggcaacctcgggcgagcggtcttccaggccaagaagcgggttctcgaacctctcggtctggttgaggaaggcgctaagacggctcctggaaagaagagaccggtagagccatcaccccagcgttctccagactcctctacgggcatcggcaagaaaggccaacagcccgccagaaaaagactcaattttggtcagactggcgactcagagtcagttccagaccctcaacctctcggagaacctccagcagcgccctctggtgtgggacctaatacaatggctgcaggcggtggcgcaccaatggcagacaataacgaaggcgccgacggagtgggtagttcctcgggaaattggcattgcgattccacatggctgggcgacagagtcatcaccaccagcacccgaacctgggccctgcccacctacaacaaccacctctacaagcaaatctccaacgggacatcggggggagccaccaacgacaacacctacttcggctacagcaccccctgggggtattttgactttaacagattccactgccacttttcaccacgtgactggcagcgactcatcaacaacaactggggattccggcccaagagactcagcttcaagctcttcaacatccaggtcaaggaggtcacgcagaatgaaggcaccaagaccatcgccaataacctcaccagcaccatccaggtgtttacggactcggagtaccagctgccgtacgttctcggctctgcccaccagggctgcctgcctccgttcccggcggacgtgttcacgattccccagtacggctacctaacactcaacaacggtagtcaggccgtgggacgctcctccttctactgcctggaatactttccttcgcagatgctgagaaccggcaacaacttccagtttacttacaccttcgaggacgtgcctttccacagcagctacgcccacagccagagcttggaccggctgatgaatcctctgattgaccagtacctgtactacttgtctcggactcaaacaacaggaggcacggcaaatacgcagactctgggcttcagccaaggtgggcctaatacaatggccaatcaggcaaagaactggctgccaggaccctgttaccgccaacaacgcgtctcaacgacaaccgggcaaaacaacaatagcaactttgcctggactgctgggaccaaataccatctgaatggaagaaattcattggctaatcctggcatcgctatggcaacacacaaagacgacgaggagcgtttttttcccagtaacgggatcctgatttttggcaaacaaaatgctgccagagacaatgcggattacagcgatgtcgtgctcaccagcgaggaagaaatcaaaaccactaaccctgtggctacagaggaatacggtatcgtggcagataacttgcagcagcaaaacacggctcctcaaattggaactgtcaacagccagggggccttacccggtatggtctggcagaaccgggacgtgtacctgcagggtcccatctgggccaagattcctcacacggacggcaacttccacccgtctccgctgatgggcggctttggcctgaaacatcctccgcctcagatcctgatcaagaacacgcctgtacctgcggatcctccgaccaccttcaaccagtcaaagctgaactctttcatcacgcaatacagcaccggacaggtcagcgtggaaattgaatgggagctgcagaaggaaaacagcaagcgctggaaccccgagatccagtacacctccaactactacaaatctacaagtgtggactttgctgttaatacagaaggcgtgtactctgaaccccgccccattggcacccgttacctcacccgtaatctgtaa

SEQ ID NO: 4005 - DNA, 2217 bp, Artificial Sequence
  source: /note="Description of Artificial Sequence: Synthetic polynucleotide"
atggctgccgatggttatcttccagattggctcgaggacaacctctctgagggcattcgcgagtggtgggcactgaaacctggagccccgaagcccaaagccaaccagcaaaagcaggacgacggccggggtctggtgcttcctggctacaagtacctcggacccttcaacggactcgacaagggggagcccgtcaacgcggcggacgcagcggccctcgagcacgacaaggcctacgaccagcagctgcaggcgggtgacaatccgtacctgcggtataaccacgccgacgccgagtttcaggagcgtctgcaagaagatacgtcttttgggggcaacctcgggcgagcagtcttccaggccaagaagcgggttctcgaacctctcggtctggttgaggaaggcgctaagacggctcctggaaagaagagaccggtagagccatcaccccagcgttctccagactcctctacgggcatcggcaagaaaggccaacagcccgccagaaaaagactcaattttggtcagactggcgactcagagtcagttccagaccctcaacctctcggagaacctccagcagcgccctctggtgtgggacctaatacaatggctgcaggcggtggcgcaccaatggcagacaataacgaaggcgccgacggagtgggtagttcctcgggaaattggcattgcgattccacatggctgggcgacagagtcatcaccaccagcacccgaacctgggccctgcccacctacaacaaccacctctacaagcaaatctccaacgggacatcgggaggagccaccaacgacaacacctacttcggctacagcaccccctgggggtattttgactttaacagattccactgccacttttcaccacgtgactggcagcgactcatcaacaacaactggggattccggcccaagagactcagcttcaagctcttcaacatccaggtcaaggaggtcacgcagaatgaaggcaccaagaccatcgccaataacctcaccagcaccatccaggtgtttacggactcggagtaccagctgccgtacgttctcggctctgcccaccagggctgcctgcctccgttcccggcggacgtgttcatgattccccagtacggctacctaacactcaacaacggtagtcaggccgtgggacgctcctccttctactgcctggaatactttccttcgcagatgctgagagccggcaacaacttccagtttacttacaccttcgaggacgtgcctttccacagcagctacgcccacagccagagcttggaccggctgatgaatcctctgattgaccagtacctgtactacttgtctcggactcaaacaacaggaggcacggcaaatacgcagactctgggcttcagccaaggtgggcctaatacaatggccaatcaggcaaagaactggctgccaggaccctgttaccgccaacaacgcgtctcaacgacaaccgggcaaaacaacaatagcaactttgcctggactgctgggaccaaataccatctgaatggaagaaattcattggctaatcctggcatcgctatggcaacacacaaagacgacgaggagcgtttttttcccagtaacgggatcctgatttttggcaaacaaaatgctgccagagacaatgcggattacagcgatgtcatgctcaccagcgaggaagaaatcaaaaccactaaccctgtggctacagaggaatacggtatcgtggcagataacttgcagcagcaaaacacggctcctcaaattggaactgtcgacagccagggggccttacccggtatggtctggcagaaccgggacgtgtacctgcagggtcccatctgggccaagattcctcacacggacggcaacttccacccgtctccgctgatgggcggctttggcctgaaacatcctccgcctcagatcctgatcaagaacacgcctgtacctgcggatcctccgaccaccttcaaccagtcaaagctgaactctttcatcacgcaatacagcaccggacaggtcagcgtggaagttgaatgggagctgcagaaggaaaacagcaagcgctggaaccccgagatccagtacacctccaactactacaaatctacaagtgtggactttgctgttaatacagaaggcgtgtactctgaaccccgccccattggcacccgttacctcacccgtaatctgtaa

SEQ ID NO: 4006 - DNA, 2217 bp, Artificial Sequence
  source: /note="Description of Artificial Sequence: Synthetic polynucleotide"
atggctgccgatggttatcttccagattggctcgaggacaacctctctgagggcattcgcgagtggtgggcgctgaaacctggagccccgaagcccaaagccaaccagcaaaagcaggacgacggccggggtctggtgcttcctggctacaagtacctcggacccttcaacggactcgacaagggggagcccgtcaacgcggcggacgcagcggccctcgagcacgacaaggcctacgaccagcagctgcaggcgggtgacaatccgtacctgcggtataaccacgccgacgccgagtttcaggagcgtctgcaagaagatacgtcttttgggggcagcctcgggcgagcagtcttccaggccaagaagcgggttctcgaacctctcggtctggttgaggaaggcgctaagacggctcctggaaagaagagaccggtagagccatcaccccagcgttctccagactcctctacgggcatcggcaagaaaggccaacagcccgccagaaaaagactcaattttggtcagactggcgactcagagtcagttccagaccctcaacctctcggagaacctccagcagcgccctctggtgtgggacctaatacaatggctgcaggcggtggcgcaccaatggcagacaataacgaaggcgccgacggagtgggtagttcctcgggaaattggcattgcgattccacatggctgggcgacagagtcatcaccaccagcacccgaacctgggccctgcccacctacaacaaccacctctacaagcaaatctccaacgggacatcgggaggagccaccaacgacaacacctacttcggctacagcaccccctgggggtattttgactttaacagattccactgccacttttcaccacgtgactggcagcgactcatcaacaacaactggggattccggcccaagagactcagcttcaagctcttcaacatccaggtcaaggaggtcacgcagaatgaaggcaccaagaccatcgccaataacctcaccagcaccatccaggtgtttacggactcggagtaccagctgccgtacgttctcggctctgcccaccagggctgcctgcctccgttcccggcggacgtgttcatgattccccagtacggctacctaacactcaacaacggtagtcaggccgtgggacgctcctccttctactgcctggaatactttccttcgcagatgctgagaaccggcaacaacttccagtttacttacaccttcgaggacgtgcctttccacagcagctacgcccacagccagagcttggaccggctgatgaatcctctgattgaccagtacctgtactacttgtctcggactcaaacaacaggaggcacggcaaatacgcagactctgggcttcagccaaggtgggcctaatacaatggccaatcaggcaaagaactggctgccaggaccctgttaccgccaacaacgcgtctcaacgacaaccgggcaaaacaacaatagcaactttgcctggactgctgggaccaaataccatctgaatggaagaaattcattggctaatcctggcatcgctatggcaacacacaaagacgacgaggagcgtttttttcccagtaacgggatcctgatttttggcaaacaaaatgctgccagagacaatgcggattacagcgatgtcatgctcaccagcgaggaagaaatcaaaaccactaaccctgtggctacagaggaatacggtatcgtggcagataacttgcagcagcaaaacacggctcctcaaattggaactgtcaacagccagggggccttacccggtatggtctggcagaaccgggacgtgtacctgcagggtcccatctgggccaagattcctcacacggacggcaacttccacccgtctccgctgatgggcggctttggcctgaaacatcctccgcctcagatcctgatcaagaacacgcctgtacctgcggatcctccgaccaccttcaaccagtcaaagctgaactctttcatcacgcaatacagcaccggacaggtcagcgtggaaattgaatgggagctgcagaaggaaaacagcaagcgctggaaccccgagatccagtacacctccaactactacaaatctacaagtgtggactttgctgttaatacagaaggcgtgtactctgaaccccgccccattggcacccgtcacctcacccgtaatctgtaa

SEQ ID NO: 4007 - DNA, 2217 bp, Artificial Sequence
  source: /note="Description of Artificial Sequence: Synthetic polynucleotide"
atggctgccgatggttatcttccagattggctcgaggacaacctctctgagggcattcgcgagtggtgggcgctgaaacctggagccccgaagcccaaagccaaccagcaaaagcaggacgacggccggggtctggtgcttcctggctacaagtacctcggacccttcaacggactcgacaagggggagcccgtcaacgcggcggacgcagcggccctcgagcacgacaaggcctacgaccagcagctgcaggcgggtgacaatccgtacctgcggtataaccacgccgacgccgagtttcaggagcgtctgcaagaagatacgtcttttgggggcaacctcgggcgagcagtcttccaggccaagaagcgggttctcgaacctctcggtctggttgaggaaggcgctaagacggctcctggaaagaagagaccggtagagccatcaccccagcgttctccagactcctctacgggcatcggcaagaaaggccaacagcccgccagaaaaagactcaattttggtcagactggcgactcagagtcagttccagaccctcaacctctcggagaacctccagcagcgccctctggtgtgggacctaatacaatggctgcaggcggtggcgcaccaatggcagacaataacgaaggcgccgacggagtgggtagttcctcgggaaattggcattgcgattccacatggctgggcgacagagtcatcaccaccagcacccgaacctgggccctgcccacctacaacaaccacctctacaagcaaatctccaacgggacatcgggaggagccaccaacgacaacacctacttcggctacagcaccccctgggggtattttgactttaacagattccactgccacttttcaccacgtgactggcagcgactcatcaacaacaactggggattccggcccaagagactcagcttcaagctcttcaacatccaggtcaaggaggtcacgcagaatgaaggcaccaagaccatcgccaataacctcaccagcaccatccaggtgtttacggactcggagtaccagctgccgtacgttctcggctctgcccaccagggctgcctgcctccgttcccggcggacgtgttcacgattccccagtacggctacctaacactcaacaacggtagtcaggccgtgggacgctcctccttctactgcctggaatactttccttcgcagatgctgagaaccggcaacaacttccagtttacttacaccttcgaggacgtgcctttccacagcagctacgcccacagccagagcttggaccggctgatgaatcctctgattgaccagtacctgtactacttgtctcggactcaaacaacaggaggcacggcaaatacgcagactctgggcttcagccaaggtgggcctaatacaatggccaatcaggcaaagaactggctgccaggaccctgttaccgccaacaacgcgtctcaacgacaaccgggcaaaacaacaatagcaactttgcctggactgctgggaccaaataccatctgaatggaagaaattcattggctaatcctggcatcgctatggtaacacacaaagacgacgaggagcgtttttttcccagtaacgggatcctgatttttggcaaacaaaatgctgccagagacaatgcggattacagcgatgtcatgctcaccagcgaggaagaaatcaaaaccactaaccctgtggctacagaggaatacggtatcgtggcagataacttgcagcagcaaaacacggctcctcaaattggaactgtcaacagccagggggccttacccggtatggtctggcagaaccgggacgtgtacctgcagggtcccatctgggccaagattcctcacacggacggcaacttccacccgtctccgctgatgggcggctttggcctgaaacatcctccgcctcagatcctgatcaagaacacgcctgtacctgcggatcctccgaccaccttcaaccagtcaaagctgaactctttcatcacgcaatacagcaccggacaggtcagcgtggaaattgaatgggagctgcagaaggaaaacagcaagcgctggaaccccgagatccagtacacctccaactactacaaatctacaagtgtggactttgctgttaatacagaaggcgtgtactctgaaccccgccccattggcacccgttacctcacccgtaatctgtaa

SEQ ID NO: 4008 - protein, 734 aa, Artificial Sequence
  source: /note="Description of Artificial Sequence: Synthetic polypeptide"
MAADGYLPDWLEDTLSEGIRQWWKLKPGPPPPKPAERHKDDSRGLVLPGYKYLGPFNGLDKGEPVNEADAAALEHDKAYDRQLDSGDNPYLKYNHADAEFQERLKEDTSFGGNLGRAVFQAKKRVLEPLGLVEEPVKTAPGKKRPVEHSPVEPDSSSGTGKAGQQPARKRLNFGQTGDADSVPDPQPLGQPPAAPSGLGTNTMATGSGAPMADNNEGADGVGNSSGNWHCDSTWMGDRVITTSTRTWALPTYNNHLYKQISSQSGASNDNHYFGYSTPWGYFDFNRFHCHFSPRDWQRLINNNWGFRPKRLNFKLFNIQVKEVTQNDGTTTIANNLTSTVQVFTDSEYQLPYVLGSAHQGCLPPFPADVFMVPQYGYLTLNNGSQAVGRSSFYCLEYFPSQMLRTGNNFTFSYTFEDVPFHSSYAHSQSLDRLMNPLIDQYLYYLSRTHSNSGTHQQSRLQFSQAGASMSGPARNWLPGPCYRQQRVSKQSADNNNSEYSWTGATKYHLNGRDSLVNPGPAMASHKDDEEKFFLMSGVLIFGKQGSDENNVDIEKVMITDEEEIRTTNPVATEQYGSVSTNLQEAKTSPATADVNHQGVLPGMVWQDRDVYLQGPIWAKIPHTDGHFHPSPLMGGFGLKHPPPQILIKNTPVPANPSTTFSAAKFASFITQYSTGQASVEIEWELQKENSKRWNPEIQYTSNYNKSVNVDFTVDTNGVYSEPRPIGTRYLTRNL

SEQ ID NO: 4009 - protein, 734 aa, Artificial Sequence
  source: /note="Description of Artificial Sequence: Synthetic polypeptide"
MAADGYLPDWLEDTLSEGIRQWWKLKPGPPPPKPAERHKDDSRGLVLPGYKYLGPFNGLDKGEPVNEADAAALEHDKAYDRQLDSGDNPYLKYNHADAEFQERLKEDTSFGGNLGRAVFQAKKRVLEPLGLVEEPVKTAPGKKRPVEHSPVEPDSSSGTGKAGQQPARKRLNFGQTGDADSVPDPQPLGQPPAAPTSLGSTTMATGSGAPMADNNEGADGVGNSSGNWHCDSQWLGDRVITTSTRTWALPTYNNHLYKQISSQSGASNDNHYFGHSTPWGYFDFNRFHCHFSPRDWQRLINNNWGFRPKRLNFKLFNIQVKEVTQNDGTTTIANNLTSTVQVFTDSEYQLPYVLGSAHQGCLPPFPADVFMVPQYGYLTLNNGSQAVGRSSFYCLEYFPSQMLRTGNNFTFSYTFEDVPFHSSYAHSQSLDRLMNPLIDQYLYYLSRTHSNSGTHQQSRLQFSQAGASMSGPARNWLPGPCYRQQRVSKQSADNNNSEYSWTGATKYRLNGRDSLVNPGSAMASHKDDEEKFFLMSGVLIFGKQGSDENNVDIEKVMITDEEEIRTTNPVATEQYGSVSTNLQEAKTSPATADVNHQGVLPGMVWQDRDVYLQGPIWAKIPHTDGHFHPSPLMGGFGLKHPPPQILIKNTPVPANPSTTFSAAKFASFITQYSTGQVSVEIEWELQKENSKRWNPEIQYTSNYNKSVNVDFTVDTNGVYSEPRPIGTRYLTRNL

SEQ ID NO: 4010 - protein, 734 aa, Artificial Sequence
  source: /note="Description of Artificial Sequence: Synthetic polypeptide"
MAADGYLPDWLEDTLSEGIRQWWKLKPGPPPPKPAERHKDDSRGLVLPGYKYLGPFNGLDKGEPVNEADAAALEHDKAYDRQLDSGDNPYLKYNHADAEFQERLKEDTSFGGNLGRAVFQAKKRVLEPLGLVEEPVKTAPGKKRPVEHSPVEPDSSSGTGKAGQQPARKRLNFGQTGDADSVPDPQPLGQPPAAPSGLGTNTMATGSGAPMADNNEGADGVGNSSGNWHCDSTWMGDRVITTSTRTWALPTYNNHLYKQISSQSGASNDNHYFGYSTPWGYFDFNRFHCHFSPRDWQRLINNNWGFRPKRLNFKLFNIQVKEVTQNDGTTTIANNLTSTVQVFTDSEYQLPYVLGSAHQGCLPPFPADVFMVPQYGYLTLNNGSQAVGRSSFYCLEYFPSQMLRTGNNFTFSYTFEDVPFHSSYAHSQSLDRLMNPLIDQYLYYLSRTHSNSGTHQQSRLQFSQAGASMSGPARNWLPGPCYRQQRVSKQSADNNNSEYSWTGATKYRLNGRDSLVNPGSAMASHKDDEEKFFLMSGVLIFGKQGSDENNVDIEKVMITDEEEIRTTNPVATEQYGSVSTNLQEAKTSPATADVNHQGVLPGMVWQDRDVYLQGPIWAKIPHTDGHFHPSPLMGGFGLKHPPPQILIKNTPVPANPSTTFSAAKFASFITQYSTGQVSVEIEWELQKENSKRWNPEIQYTSNYNKSVNVDFTVDTNGVYSEPRPIGTRYLTRNL

SEQ ID NO: 4011 - protein, 734 aa, Artificial Sequence
  source: /note="Description of Artificial Sequence: Synthetic polypeptide"
MAADGYLPDWLEDTLSEGIRQWWKLKPGPPPPKPAERHKDDSRGLVLPGYKYLGPFNGLDKGEPVNEADAAALEHDKAYDRQLDSGDNPYLKYNHADAEFQERLKEDTSFGGNLGRAVFQAKKRVLEPLGLVEEPVKTAPGKKRPVEHSPVEPDSSSGTGKAGQQPARKRLNFGQTGDADSVPDPQPLGQPPAAPTSLGSTTMATGSGAPMADNNEGADGVGNSSGNWHCDSQWLGDRVITTSTRTWALPTYNNHLYKQISSQSGASNDNHYFGHSTPWGYFDFNRFHCHFSPRDWQRLINNNWGFRPKRLNFKLFNIQVKEVTQNDGTTTIANNLTSTVQVFTDSEYQLPYVLGSAHQGCLPPFPADVFMVPQYGYLTLNNGSQAVGRSSFYCLEYFPSQMLRTGNNFTFSYTFEDVPFHSSYAHSQSLDRLMNPLIDQYLYYLSRTHSNSGTHQQSRLQFSQAGASMSGPARNWLPGPCYRQQRVSKQSADNNNSEYSWTGATKYHLNGRDSLVNPGPAMASHKDDEEKFFLMSGVLIFGKQGSDENNVDIEKVMITDEEEIRTTNPVATEQYGSVSTNLQEAKTSPATADVNHQGVLPGMVWQDRDVYLQGPIWAKIPHTDGHFHPSPLMGGFGLKHPPPQILIKNTPVPANPSTTFSAAKFASFITQYSTGQASVEIEWELQKENSKRWNPEIQYTSNYNKSVNVDFTVDTNGVYSEPRPIGTRYLTRNL

SEQ ID NO: 4012 - protein, 734 aa, Artificial Sequence
  source: /note="Description of Artificial Sequence: Synthetic polypeptide"
MAADGYLPDWLEDTLSEGIRQWWKLKPGPPPPKPAERHKDDSRGLVLPGYKYLGPFNGLDKGEPVNEADAAALEHDKAYDRQLDSGDNPYLKYNHADAEFQERLKEDTSFGGNLGRAVFQAKKRVLEPLGLVEEPVKTAPGKKRPVEHSPVEPDSSSGTGKAGQQPARKRLNFGQTGDADSVPDPQPLGQPPAAPTSLGSTTMATGSGAPMADNNEGADGVGNSSGNWHCDSQWLGDRVITTSTRTWALPTYNNHLYKQISSQSGASNDNHYFGYSTPWGYFDFNRFHCHFSPRDWQRLINNNWGFRPKRLNFKLFNIQVKEVTQNDGTTTIANNLTSTVQVFTDSEYQLPYVLGSAHQGCLPPFPADVFMVPQYGYLTLNNGSQAVGRSSFYCLEYFPSQMLRTGNNFTFSYTFEDVPFHSSYAHSQSLDRLMNPLIDQYLYYLSRTHSNSGTHQQSRLQFSQAGASMSGPARNWLPGPCYRQQRVSKQSADNNNSEYSWTGATKYRLNGRDSLVNPGSAMASHKDDEEKFFLMSGVLIFGKQGSDENNVDIEKVMITDEEEIRTTNPVATEQYGSVSTNLQEAKTSPATADVNHQGVLPGMVWQDRDVYLQGPIWAKIPHTDGHFHPSPLMGGFGLKHPPPQILIKNTPVPANPSTTFSAAKFASFITQYSTGQVSVEIEWELQKENSKRWNPEIQYTSNYNKSVNVDFTVDTNGVYSEPRPIGTRYLTRNL

SEQ ID NO: 4013 - protein, 734 aa, Artificial Sequence
  source: /note="Description of Artificial Sequence: Synthetic polypeptide"
MAADGYLPDWLEDTLSEGIRQWWKLKPGPPPPKPAERHKDDSRGLVLPGYKYLGPFNGLDKGEPVNEADAAALEHDKAYDRQLDSGDNPYLKYNHADAEFQERLKEDTSFGGNLGRAVFQAKKRVLEPLGLVEEPVKTAPGKKRPVEHSPVEPDSSSGTGKAGQQPARKRLNFGQTGDADSVPDPQPLGQPPAAPSGLGTNTMATGSGAPMADNNEGADGVGNSSGNWHCDSTWMGDRVITTSTRTWALPTYNNHLYKQISSQSGASNDNHYFGYSTPWGYFDFNRFHCHFSPRDWQRLINNNWGFRPKRLNFKLFNIQVKEVTQNDGTTTIANNLTSTVQVFTDSEYQLPYVLGSAHQGCLPPFPADVFMVPQYGYLTLNNGSQAVGRSSFYCLEYFPSQMLRTGNNFTFSYTFEDVPFHSSYAHSQSLDRLMNPLIDQYLYYLSRTHSNSGTHQQSRLQFSQAGASMSGPARNWLPGPCYRQQRVSKQSADNNNSEYSWTGATKYRLNGRDSLVNPGSAMASHKDDEEKFFLMSGVLIFGKQGSDENNVDIEKVMITDEEEIRTTNPVATEQYGSVSTNLQEAKTSPATADVNHQGVLPGMVWQDRDVYLQGPIWAKIPHTDGHFHPSPLMGGFGLKHPPPQILIKNTPVPANPSTTFSAAKFASFITQYSTGQASVEIEWELQKENSKRWNPEIQYTSNYNKSVNVDFTVDTNGVYSEPRPIGTRYLTRNL

SEQ ID NO: 4014 - protein, 734 aa, Artificial Sequence
  source: /note="Description of Artificial Sequence: Synthetic polypeptide"
MAADGYLPDWLEDTLSEGIRQWWKLKPGPPPPKPAERHKDDSRGLVLPGYKYLGPFNGLDKGEPVNEADAAALEHDKAYDRQLDSGDNPYLKYNHADAEFQERLKEDTSFGGNLGRAVFQAKKRVLEPLGLVEEPVKTAPGKKRPVEHSPVEPDSSSGTGKAGQQPARKRLNFGQTGDADSVPDPQPLGQPPAAPTSLGSTTMATGSGAPMADNNEGADGVGNSSGNWHCDSTWMGDRVITTSTRTWALPTYNNHLYKQISSQSGASNDNHYFGYSTPWGYFDFNRFHCHFSPRDWQRLINNNWGFRPKRLNFKLFNIQVKEVTQNDGTTTIANNLTSTVQVFTDSEYQLPYVLGSAHQGCLPPFPADVFMVPQYGYLTLNNGSQAVGRSSFYCLEYFPSQMLRTGNNFTFSYTFEDVPFHSSYAHSQSLDRLMNPLIDQYLYYLSRTHSNSGTHQQSRLQFSQAGASMSGPARNWLPGPCYRQQRVSKQSADNNNSEYSWTGATKYRLNGRDSLVNPGSAMASHKDDEEKFFLMSGVLIFGKQGSDENNVDIEKVMITDEEEIRTTNPVATEQYGSVSTNLQEAKTSPATADVNHQGVLPGMVWQDRDVYLQGPIWAKIPHTDGHFHPSPLMGGFGLKHPPPQILIKNTPVPANPSTTFSAAKFASFITQYSTGQVSVEIEWELQKENSKRWNPEIQYTSNYNKSVNVDFTVDTNGVYSEPRPIGTRYLTRNL

SEQ ID NO: 4015 - protein, 734 aa, Artificial Sequence
  source: /note="Description of Artificial Sequence: Synthetic polypeptide"
MAADGYLPDWLEDTLSEGIRQWWKLKPGPPPPKPAERHKDDSRGLVLPGYKYLGPFNGLDKGEPVNEADAAALEHDKAYDRQLDSGDNPYLKYNHADAEFQERLKEDTSFGGNLGRAVFQAKKRVLEPLGLVEEPVKTAPGKKRPVEHSPVEPDSSSGTGKAGQQPARKRLNFGQTGDADSVPDPQPLGQPPAAPSGLGTNTMATGSGAPMADNNEGADGVGNSSGNWHCDSTWMGDRVITTSTRTWALPTYNNHLYKQISSQSGASNDNHYFGYSTPWGYFDFNRFHCHFSPRDWQRLINNNWGFRPKRLNFKLFNIQVKEVTQNGGTTTIANNLTSTVQVFTDSEYQLPYVLGSAHQGCLPPFPADVFMVPQYGYLTLNNGSQAVGRSSFYCLEYFPSQMLRTGNNFTFSYTFEDVPFHSSYAHSQSLDRLMNPLIDQYLYYLSRTHSNSGTHQQSRLQFSQAGASMSGPARNWLPGPCYRQQRVSKQSADNNNSEYSWTGATKYRLNGRDSLVNPGSAMASHKDDEEKFFLMSGVLIFGKQGSDENNVDIEKVMITDEEEIRTTNPVATEQYGSVSTNLQEAKTSPATADVNHQGVLPGMVWQDRDVYLQGPIWAKIPHTDGHFHPSPLMGGFGLKHPPPQILIKNTPVPANPSTTFSAAKFASFITQYSTGQVSVEIEWELQKENSKRWNPEIQYTSNYNKSVNVDFTVDTNGVYSEPRPIGTRYLTRNL

SEQ ID NO: 4016 - protein, 735 aa, Artificial Sequence
  source: /note="Description of Artificial Sequence: Synthetic polypeptide"
MAADGYLPDWLEDTLSEGIRQWWKLKPGPPPPKPAERHKDDSRGLVLPGYKYLGPFNGLDKGEPVNEADAAALEHDKAYDRQLDSGDNPYLKYNHADAEFQERLKEDTSFGGNLGRAVFQAKKRVLEPLGLVEEPVKTAPGKKRPVEHSPVEPDSSSGTGKAGQQPARKRLNFGQTGDADSVPDPQPLGQPPAAPSGLGTNTMATGSGAPMADNNEGADGVGNSSGNWHCDSTWMGDRVITTSTRTWALPTYNNHLYKQISSQSGASNDNHYFGYSTPWGYFDFNRFHCHFSPRDWQRLINNNWGFRPKRLNFKLFNIQVKEVTQNDGTTTIANNLTSTVQVFTDSEYQLPYVLGSAHQGCLPPFPADVFMVPQYGYLTLNNGSQAVGRSSFYCLEYFPSQMLRTGNNFTFSYTFEDVPFHSSYAHSQSLDRLMNPLIDQYLYYLSRTNTPSGTTTQSRLQFSQAGASDIRDQSRNWLPGPCYRQQRVSKTSADNNNSEYSWTGATKYHLNGRDSLVNPGPAMASHKDDEEKFFPQSGILIFGKQGSEKTNVDIEKVMITDEEEIRTTNPVATEQYGSVSTNLQRGNRQAATADVNTQGVLPGMVWQDRDVYLQGPIWAKIPHTDGHFHPSPLMGGFGLKHPPPQILIKNTPVPANPSTTFSAAKFASFITQYSTGQVSVEIEWELQKENSKRWNPEIQYTSNYNKSVNVDFTVDTNGVYSEPRPIGTRYLTRNL

SEQ ID NO: 4017 - protein, 735 aa, Artificial Sequence
  source: /note="Description of Artificial Sequence: Synthetic polypeptide"
MAADGYLPDWLEDTLSEGIRQWWKLKPGPPPPKPAERHKDDSRGLVLPGYKYLGPFNGLDKGEPVNEADAAALEHDKAYDRQLDSGDNPYLKYNHADAEFQERLKEDTSFGGNLGRAVFQAKKRVLEPLGLVEEPVKTAPGKKRPVEHSPVEPDSSSGTGKAGQQPARKRLNFGQTGDADSVPDPQPLGQPPAAPSGLGTNTMATGSGAPMADNNEGADGVGNSSGNWHCDSTWMGDRVITTSTRTWALPTYNNHLYKQISSQSGASNDNHYFGYSTPWGYFDFNRFHCHFSPRDWQRLINNNWGFRPKRLNFKLFNIQVKEVTQNDGTTTIANNLTSTVQVFTDSEYQLPYVLGSAHQGCLPPFPADVFMVPQYGYLTLNNGSQAVGRSSFYCLEYFPSQMLRTGNNFTFSYTFEDVPFHSSYARSQSLDRLMNPLIDQYLYYLSRTNTPSGTTTQSRLQFSQAGASDIRDQSRNWLPGPCYRQQRVSKTSADNNNSEYSWTGATKYHLNGRDSLVNPGPAMASHKDDEEKFFPQSGVLIFGKQGSEKTNVDIEKVMITDEEEIRTTNPVATEQYGSVSTNLQRGNRQAATADVNTQGVLPGMVWQDRDVYLQGPIWAKIPHTDGHFHPSPLMGGFGLKHPPPQILIKNTPVPANPSTTFSAAKFASFITQYSTGQVSVEIEWELQKENSKRWNPEIQYTSNYNKSVNVDFTVDTNGVYSEPRPIGTRYLTRNL

SEQ ID NO: 4018 - protein, 735 aa, Artificial Sequence
  source: /note="Description of Artificial Sequence: Synthetic polypeptide"
MAADGYLPDWLEDTLSEGIRQWWKLKPGPPPPKPAERHKDDSRGLVLPGYKYLGPFNGLDKGEPVNEADAAALEHDKAYDRQLDSGDNPYLKYNHADAEFQERLKEDTSFGGNLGRAVFQAKKRVLEPLGLVEEPVKTAPGKKRPVEHSPVEPDSSSGTGKAGQQPARKRLNFGQTGDADSVPDPQPLGQPPAAPSGLGTNTMATGSGAPMADNNEGADGVGNSSGNWHCDSTWMGDRVITTSTRTWALPTYNNHLYKQISSQSGASNDNHYFGYSTPWGYFDFNRFHCHFSPRDWQRLINNNWGFRPKRLNFKLFNIQVKEVTQNDGTTTIANNLTSTVQVFTDSEYQLPYVLGSAHQGCLPPFPADVFMVPQYGYLTLNNGSQAVGRSSFYCLEYFPSQMLRTGNNFTFSYTFEDVPFHSSYAHSQSLDRLMNPLIDQYLYYLSRTNTPSGTTTQSRLQFSQAGASDIRDQSRNWLPGPCYRQQRVSKTSADNNNSEYSWTGVTKYHLNGRDSLVNPGPAMASHKDDEEKFFPQSGVLIFGKQGSEKTNVDIEKVMITDEEEIRTTNPVATEQYGSVSTNLQRGNRQAATADVNTQGVLPGMVWQDRDVYLQGPIWAKIPHTDGHFHPSPLMGGFGLKHPPPQILIKNTPVPANPSTTFSAAKFASFITQYSTGQVSVEIEWELQKENSKRWNPEIQYTSNYNKSVNVDFTVDTNGVYSEPRPIGTRYLTRNL

SEQ ID NO: 4019 - protein, 735 aa, Artificial Sequence
  source: /note="Description of Artificial Sequence: Synthetic polypeptide"
MAADGYLPDWLEDTLSEGIRQWWKLKPGPPPPKPAERHKDDSRGLVLPGYKYLGPFNGLDKGEPVNEADAAALEHDKAYDRQLDSGDNPYPKYNHADAEFQERLKEDTSFGGNLGRAVFQAKKRVLEPLGLVEEPVKTAPGKKRPVEHSPVEPDSSSGTGKAGQQPARKRLNFGQTGDADSVPDPQPLGQPPAAPSGLGTNTMATGSGAPMADNNEGADGVGNSSGNWHCDSTWMGDRVITTSTRTWALPTYNNHLYKQISSQSGASNDNHYFGYSTPWGYFDFNRFHCHFSPRDWQRLINNNWGFRPKRLNFKLFNIQVKEVTQNDGTTTIANNLTSTVQVFTDSEYQLPYVLGSAHQGCLPPFPADVFMVPQYGYLTLNNGSQAVGRSSFYCLEYFPSQMLRTGNNFTFSYTFEDVPFHSSYAHSQSLDRLMNPLIDQYLYYLSRTNTPSGTTTQSRLQFSQAGASDIRDQSRNWLPGPCYRQQRVSKTSADNNNSEYSWTGATKYHLNGRDSLVNPGPAMASHKDDEEKFFPQSGVLIFGKQGSEKTNVDIEKVMITDEEEIRTTNPVATEQYGSVSTNLQRGNRQAATADVNTQGVLPGMVWQDRDVYLQGPIWAKIPHTDGHFHPSPLMGGFGLKHPPPQILIKNTPVPANPSTTFSAAKFASFITQYSTGQVSVEIEWELQKENSKRWNPEIQYTSNYNKSVNVDFTVDTNGVYSEPRPIGTRYLTRNL

SEQ ID NO: 4020 - protein, 735 aa, Artificial Sequence
  source: /note="Description of Artificial Sequence: Synthetic polypeptide"
MAADGYLPDWLEDTLSEGIRQWWKLKPGPPPPKPAERHKDDSRGLVLPGYKYLGPFNGLDKGEPVNEADAAALEHDKAYDRQLDSGDNPYLKYNHADAEFQERLKEDTSFGGNLGRAVFQAKKRVLEPLGLVEEPVKTAPGKKRPVEHSPVEPDSSSGTGKAGQQPARKRLNFGQTGDADSVPDPQPLGQPPAAPSGLGTNTMATGSGAPMADNNEGADGVGNSSGNWHCDSTWMGDRVITTSTRTWALPTYNNHLYKQISSQSGASNDNHYFGYSTPWGYFDFNRFHCHFSPRDWQRLINNNWGFRPKRLNFKLFNIQVKEVTQNDGTTTIANNLTSTVQVFTDSEYQLPYVLGSAHQGCLPPFPADVFMVPQYGYLTLNNGSQAVGRSSFYCLEYFPSQMLRTGNNFTFSYTFEDVPFHSSYAHSQSLDRLMNPLIDQYLYYLSRTNTPSGTTTQSRLQFSQAGASDIRDQSRNWLPGPCYRQQRVSKTSADNNNSEYSWTGATKYHLNGRDSLVNPGPAMASHKDDEEKFFPQSGVPIFGKQGSEKTNVDIEKVMITDEEEIRTTNPVATEQYGSVSTNLQRGNRQAATADVNTQGVLPGMVWQDRDVYLQGPIWAKIPHTDGHFHPSPLMGGFGLKHPPPQILIKNTPVPANPSTTFSAAKFASFITQYSTGQVSVEIEWELQKENSKRWNPEIQYTSNYNKSVNVDFTVDTNGVYSEPRPIGTRYLTRNL

SEQ ID NO: 4021 - protein, 735 aa, Artificial Sequence
  source: /note="Description of Artificial Sequence: Synthetic polypeptide"
MAADGYLPDWLEDTLSEGIRQWWKLKPGPPPPKPAERHKDDSRGLVLPGYKYLGPFNGLDKGEPVNEADAAALEHDKAYDRQLDSGDNPYLKYNHADAEFQERLKEDTSFGGNLGRAVFQAKKRVLEPLGLVEEPVKTAPGKKRPVEHSPVEPDSSSGTGKAGQQPARKRLNFGQTGDADSVPDPQPLGQPPAAPSGLGTNTMATGSGAPMADNNEGADGVGNSSGNWHCDSTWMGDRVITTSTRTWALPTYNNHLYKQISSQSGASNDNHYFGYSTPWGYFDFNRFHCHFSPRDWQRLINNNWGFRPRRLNFKLFNIQVKEVTQNDGTTTIANNLTSTVQVFTDSEYQLPYVLGSAHQGCLPPFPADVFMVPQYGYLTLNNGSQAVGRSSFYCLEYFPSQMLRTGNNFTFSYTFEDVPFHSSYAHSQSLDRLMNPLIDQYLYYLSRTNTPSGTTTQSRLQFSQAGASDIRDQSRNWLPGPCYRQQRVSKTSADNNNSEYSWTGATKYHLNGRDSLVNPGPAMASHKDDEEKFFPQSGVLIFGKQGSEKTNVDIEKVMITDEEEIRTTNPVATEQYGSVSTNLQRGNRQAATADVNTQGVLPGMVWQDRDVYLQGPIWAKIPHTDGHFHPSPLMGGFGLKHPPPQILIKNTPVPANPSTTFSAAKFASFITQYSTGQVSVEIEWELQKENSKRWNPEIQYTSNYNKSVNVDFTVDTNGVYSEPRPIGTRYLTRNL

SEQ ID NO: 4022 - protein, 735 aa, Artificial Sequence
  source: /note="Description of Artificial Sequence: Synthetic polypeptide"
MAADGYLPDWLEDTLSEGIRQWWKLKPGPPPPKPAERHKDDSRGLVLPGYKYLGPFNGLDKGEPVNEADAAALEHDKAYDRQLDSGDNPYLKYNHADAEFQERLKEDTSFGGNLGRAVFQAKKRVLEPLGLVEEPVKTAPGKKRPVEHSPVEPDSSSGTGKAGQQPARKRLNFGQTGDADSVPDPQPLGQPPAAPPGLGTNTMATGSGAPMADNNEGADGVGNSSGNWHCDSTWMGDRVITTSTRTWALPTYNNHLYKQISSQSGASNDNHYFGYSTPWGYFDFNRFHCHFSPRDWQRLINNNWGFRPKRLNFKLFNIQVKEVTQNDGTTTIANNLTSTVQVFTDSEYQLPYVLGSAHQGCLPPFPADVFMVPQYGYLTLNNGSQAVGRSSFYCLEYFPSQMLRTGNNFTFSYTFEDVPFHSSYAHSQSLDRLMNPLIDQYLYYLSRTNTPSGTTTQSRLQFSQAGASDIRDQSRNWLPGPCYRQQRVSKTSADNNNSEYSWTGATKYHLNGRDSLVNPGPAMASHKDDEEKFFPQSGVLIFGKQGSEKTNVDIEKVMITDEEEIRTTNPVATEQYGSVSTNLQRGNRQAATADVNTQGVLPGMVWQDRDVYLQGPIWAKIPHTDGHFHPSPLMGGFGLKHPPPQILIKNTPVPANPSTTFSAAKFASFITQYSTGQVSVEIEWELQKENSKRWNPEIQYTSNYNKSVNVDFTVDTNGVYSEPRPIGTRYLTRNL

SEQ ID NO: 4023 - protein, 735 aa, Artificial Sequence
  source: /note="Description of Artificial Sequence: Synthetic polypeptide"
MAADGYLPDWLEDTLSEGIRQWWKLKPGPPPPKPAERHKDDSRGLVLPGYKYLGPFNGLDKGEPVNEADAAALEHDKAYDRQLDSGDNPYLKYNHADAEFQERLKEDTSFGGNLGRAVFQAKKRVLEPLGLVEEPVKTAPGKKRPVEHSPVEPDSSSGTGKAGQQPARKRLNFGQTGDADSVPDPQPLGQPPAAPSGLGTNTMATGSGAPMADNNEGADGVGNSSGNWHCDSTWMGDRVITTSTRTWALPTYNNHLYKQISSQSGASNDNHYFGYSTPWGYFDFNRFHCHFSPRDWQRLINNNWGFRPKRLNFKLFNIQVKEVTQNDGTTTIANNLTSTVQVFTDSEYQLPYVLGSAHQGCLPPFPADVFMVPQYGYLTLNNGSQAVGRSSFYCLEYFPSQMLRTGNNFTFSYTFEDVPFHSSYAHSQSLDRLMNPLIDQYLYYLSRTNTPSGTTTQSRLQFSQAGASDIRDQSRNWLPGPCYRQQRVSKTSADNNNSEYSWTGATKYHLNGRDSLVNPGPAMASHKDDEEKFFPQSGVLIFGKQGSEKTNVDIEKVMITDEEEIRTTNPVATEQYGSVSTNLQRGNRQAATADVNTQGVLPGMVWQDRDVYLQGPIWAKIPHTDGHFHPSPLMGGFGLKHPPPQILIKNTPVPANPSTTFSAAKFASFITQYSTGQVSVEIEWELQKENSKRWNPEIQCTSNYNKSVNVDFTVDTNGVYSEPRPIGTRYLTRNL

SEQ ID NO: 4024 - protein, 735 aa, Artificial Sequence
  source: /note="Description of Artificial Sequence: Synthetic polypeptide"
MAADGYLPDWLEDTLSEGIRQWWKLKPGPPPPKPAERHKDDSRGLVLPGYKYLGPFNGLDKGEPVNEADAAALEHDKAYDRQLDSGDNPYLKYNHADAEFQERLKEDTSFGGNLGRAVFQAKKRVLEPLGLVEEPVKTAPGKKRPVEHSPVEPDSSSGTGKAGQQPARKRLNFGQTGDADSVPDPQPLGQPPAAPSGLGTNTMATGSGAPMADNNEGADGVGNSSGNWHCDSTWMGDRVITTSTRTWALPTYNNHLYKQISSQSGASNDNHYFGYSTPWGYFDFNRFHCHFSPRDWQRLINNNWGFRPKRLNFKLFNIQVKEVTQNDGTTTIANNLTSTVQVFTDSEYQLPYVLGSAHQGCLPPFPADVFMVPQYGYLTLNNGSQAVGRSSFYCLEYFPSQMLRTGNNFTFSYTFEDVPFHSSYAHSQSLDRLMNPLIDQYLYYLSRTNTPSGTTTQSRLQFSQAGASDIRDQSRNWLPGPCYRQQRVSKTSADNNNSEYSWTGATKYHLNGRDSLVNPGPAMASHKDDEEKFFPQSGVLIFGKQGSEKTNVDIEKVMITDEEEIRTTNPVATEQYGSVSTNLQRGNRQAATADVNTQGVLPGMVWQDRDVYLQGPIWAKIPHTDGHFHPSPLMGGFGLKHPPPQILIKNTPVPANPSTTFSAAKFASFITRYSTGQVSVEIEWELQKENSKRWNPEIQYTSNYNKSVNVDFTVDTNGVYSEPRPIGTRYLTRNL

SEQ ID NO: 4025 - protein, 735 aa, Artificial Sequence
  source: /note="Description of Artificial Sequence: Synthetic polypeptide"
MAADGYLPDWLEDTLSEGIRQWWKLKPGPPPPKPAERHKDDSRGLVLPGYKYLGPFNGLDKGEPVNEADAAALEHDKAYDRQLDSGDNPYLKYNHADAEFRERLKEDTSFGGNLGRAVFQAKKRVLEPLGLVEEPVKTAPGKKRPVEHSPVEPDSSSGTGKAGQQPARKRLNFGQTGDADSVPDPQPLGQPPAAPSGLGTNTMATGSGAPMADNNEGADGVGNSSGNWHCDSTWMGDRVITTSTRTWALPTYNNHLYKQISSQSGASNDNHYFGYSTPWGYFDFNRFHCHFSPRDWQRLINNNWGFRPKRLNFKLFNIQVKEVTQNDGTTTIANNLTSTVQVFTDSEYQLPYVLGSAHQGCLPPFPADVFMVPQYGYLTLNNGSQAVGRSSFYCLEYFPSQMLRTGNNFTFSYTFEDVPFHSSYAHSQSLDRLMNPLIDQYLYYLSRTNTPSGTTTQSRLQFSQAGASDIRDQSRNWLPGPCYRQQRVSKTSADNNNSEYSWTGATKYHLNGRDSLVNPGPAMASHKDDEEKFFPQSGVLIFGKQGSEKTNVDIEKVMITDEEEIRTTNPVATEQYGSVSTNLQRGNRQAATADVNTQGVLPGMVWQDRDVYLQGPIWAKIPHTDGHFHPSPLMGGFGLKHPPPQILIKNTPVPANPSTTFSAAKFASFITQYSTGQVSVEIEWELQKENSKRWNPEIQYTSNYNKSVNVDFTVDTNGVYSEPRPIGTRYLTRNL

SEQ ID NO: 4026 - protein, 735 aa, Artificial Sequence
  source: /note="Description of Artificial Sequence: Synthetic polypeptide"
MAADGYLPDWLEDTLSEGIRQWWKLKPGPPPPKPAERHKDDSRGLVLPGYKYLGPFNGLDKGEPVNEADAAALEHDKAYDRQLDSGDNPYLKHNHADAEFQERLKEDTSFGGNLGRAVFQAKKRVLEPLGLVEEPVKTAPGKKRPVEHSPVEPDSSSGTGKAGQQPARKRLNFGQTGDADSVPDPQPLGQPPAAPSGLGTNTMATGSGAPMADNNEGADGVGNSSGNWHCDSTWMGDRVITTSTRTWALPTYNNHLYKQISSQSGASNDNHYFGYSTPWGYFDFNRFHCHFSPRDWQRLINNNWGFRPKRLNFKLFNIQVKEVTQNDGTTTIANNLTSTVQVFTDSEYQLPYVLGSAHQGCLPPFPADVFMVPQYGYLTLNNGSQAVGRSSFYCLEYFPSQMLRTGNNFTFSYTFEDVPFHSSYAHSQSLDRLMNPLIDQYLYYLSRTNTPSGTTTQSRLQFSQAGASDIRDQSRNWLPGPCYRQQRVSKTSADNNNSEYSWTGATKYHLNGRDSLVNPGPAMASHKDDEEKFFPQSGVLIFGKQGSEKTNVDIEKVMITDEEEIRTTNPVATEQYGSVSTNLQRGNRQAATADVNTQGVLPGMVWQDRDVYLQGPIWAKIPHTDGHFHPSPLMGGFGLKHPPPQILIKNTPVPANPSTTFSAAKFASFITQYSTGQVSVEIEWELQKENSKRWNPEIQYTSNYNKSVNVDFTVDTNGVYSEPRPIGTRYLTRNL

SEQ ID NO: 4027 - protein, 735 aa, Artificial Sequence
  source: /note="Description of Artificial Sequence: Synthetic polypeptide"
MAADGYLPDWLEDTLSEGIRQWWKLKPGPPPPKPAERHKDDSRGLVLPGYKYLGPFNGLDKGEPVNEADAAALEHDKAYDRQLDSGDNPYLKYNHADAEFQERLKEDTSFGGNLGRAVFQAKKRVLEPLGLVEEPVKTAPGKKRPVEHSPVEPDSSSGTGKAGQQPARKRLNFGQTGDADSVPDPQPLGQPPAAPSGLGTNTMATGSGAPMADNNEGADGVGNSSGNWHCDSTWMGDRVITTSTRTWALPTYNNHLYKQISSQSGASNDNHYFGYSTPWGYFDFNRFHCHFSPRDWQRLINNNWGFRPKRLNFKLFNIQVKEVTQNDGTTTIANNLTSTVQVFTDSEYQLPYVLGSAHQGCLPPFPADVFMVPQYGYLTLNNGSRAVGRSSFYCLEYFPSQMLRTGNNFTFSYTFEDVPFHSSYAHSQSLDRLMNPLIDQYLYYLSRTNTPSGTTTQSRLQFSQAGASDIRDQSRNWLPGPCYRQQRVSKTSADNNNSEYSWTGATKYHLNGRDSLVNPGPAMASHKDDEEKFFPQSGVLIFGKQGSEKTNVDIEKVMITDEEEIRTTNPVATEQYGSVSTNLQRGNRQAATADVNTQGVLPGMVWQDRDVYLQGPIWAKIPHTDGHFHPSPLMGGFGLKHPPPQILIKNTPVPANPSTTFSAAKFASFITQYSTGQVSVEIEWELQKENSKRWNPEIQYTSNYNKSVNVDFTVDTNGVYSEPRPIGTRYLTRNL

SEQ ID NO: 4028 - protein, 735 aa, Artificial Sequence
  source: /note="Description of Artificial Sequence: Synthetic polypeptide"
MAADGYLPDWLEDTLSEGIRQWWKLKPGPPPPKPAERHKDDSRGLVLPGYKYLGPFNGLDKGEPVNEADAAALEHDKAYDRQLDSGDNPYLKYNHADAEFQERLKEDTSFGGNLGRAVFQAKKRVLEPLGLVEEPVKTAPGKKRPVEHSPVEPDSSSGTGKAGQQPARKRLNFGQTGDADSVPDPQPLGQPPAAPSGLGTNTMATGSGAPMADNNEGADGVGNSSGNWHCDSTWMGDRVITTSTRTWALPTYNNHLYKQISSQSGASNDNHYFGYSTPWGYFDFNRFHCHFSPRDWQRLINNNWGFRPKRLNFKLFNIQVKEVTQNDGTTTIANNLTSTVQVFTDSEYQLPYVLGSAHQGCLPPFPADVFMVPQYGYLTLNNGSQAVGRSSFYCLEYFPSQMLRTGNNFTFSYTFEDVPFHSSYAHSQSLDRLMNPLIDQYLYYLSRTNTPSGTTTQSRLQFSQAGASDIRDQSRNWLPGPCYRQQRVSKTSADNNNSEYSWTGATKYHLNGRDSLVNPGPAMASHKDDEEKFFPQSGVLIFGKQGSEKTNVDIEKVVITDEEEIRTTNPVATEQYGSVSTNLQRGNRQAATADVNTQGVLPGMVWQDRDVYLQGPIWAKIPHTDGHFHPSPLMGGFGLKHPPPQILIKNTPVPANPSTTFSAAKFASFITQYSTGQVSVEIEWELQKENSKRWNPEIQYTSNYNKSVNVDFTVDTNGVYSEPRPIGTRYLTRNL

SEQ ID NO: 4029 - protein, 735 aa, Artificial Sequence
  source: /note="Description of Artificial Sequence: Synthetic polypeptide"
MAADGYLPDWLEDTLSEGIRQWWKLKPGPPPPKPAERHKDDSRGLVLPGYKYLGPFNGLDKGEPVNEADAAALEHDKAYDRQLDSGDNPYLKYNHADAEFQERLKEDTSFGGNLGRAVFQAKKRVLEPLGLVEEPVKTAPGKKRPVEHSPVEPDSSSGTGKAGQQPARKRLNFGQTGDADSVPDPQPLGQPPAAPSGLGTNTMATGSGAPMADNNEGADGVGNSSGNWHCDSTWMGDRVITTSTRTWALPTYNNHLYKQISSQSGASNDNHYFGYSTPWGYFDFNRFHCHFSPRDWQRLINNNWGFRPKRLNFKLFNIQVKEVTQNDGTTTIANNLTSTVQVFTDSEYQLPYVLGSAHQGCLPPFPADVFMVPQYGYLTLNNGSQAVGRSSFYCLEYFPSQMLRTGNNFTFSHTFEDVPFHSSYAHSQSLDRLMNPLIDQYLYYLSRTNTPSGTTTQSRLQFSQAGASDIRDQSRNWLPGPCYRQQRVSKTSADNNNSEYSWTGATKYHLNGRDSLVNPGPAMASHKDDEEKFFPQSGVLIFGKQGSEKTNVDIEKVMITDEEEIRTTNPVATEQYGSVSTNLQRGNRQAATADVNTQGVLPGMVWQDRDVYLQGPIWAKIPHTDGHFHPSPLMGGFGLKHPPPQILIKNTPVPANPSTTFSAAKFASFITQYSTGQVSVEIEWELQKENSKRWNPEIQYTSNYNKSVNVDFTVDTNGVYSEPRPIGTRYLTRNL

SEQ ID NO: 4030 - protein, 735 aa, Artificial Sequence
  source: /note="Description of Artificial Sequence: Synthetic polypeptide"
MAADGYLPDWLEDTLSEGIRQWWKLKPGPPPPKPAERHKDDSRGLVLPGYKYLGPFNGLDKGEPVNEADAAALEHDKAYDRQLDSGDNPYLKYNHADAEFQERLKEDTSFGGNLGRAVFQAKKRVLEPLGLVEEPVKTAPGKKRPVEHSPVEPDSSSGTGKAGQQPARKRLNFGQTGDADSVPDPQPLGQPPAAPSGLGTNTMATGSGAPMADNNEGADGVGNSSGNWHCDSTWMGGRVITTSTRTWALPTYNNHLYKQISSQSGASNDNHYFGYSTPWGYFDFNRFHCHFSPRDWQRLINNNWGFRPKRLNFKLFNIQVKEVTQNDGTTTIANNLTSTVQVFTDSEYQLPYVLGSAHQGCLPPFPADVFMVPQYGYLTLNNGSQAVGRSSFYCLEYFPSQMLRTGNNFTFSYTFEDVPFHSSYAHSQSLDRLMNPLIDQYLYYLSRTNTPSGTTTQSRLQFSQAGASDIRDQSRNWLPGPCYRQQRVSKTSADNNNSEYSWTGATKYHLNGRDSLVNPGPAMASHKDDEEKFFPQSGVLIFGKQGSEKTNVDIEKVMITDEEEIRTTNPVATEQYGSVSTNLQRGNRQAATADVNTQGVLPGMVWQDRDVYLQGPIWAKIPHTDGHFHPSPLMGGFGLKHPPPQILIKNTPVPANPSTTFSAAKFASFITQYSTGQVSVEIEWELQKENSKRWNPEIQYTSNYNKSVNVDFTVDTNGVYSEPRPIGTRYLTRNL

SEQ ID NO: 4031 - protein, 735 aa, Artificial Sequence
  source: /note="Description of Artificial Sequence: Synthetic polypeptide"
MAADGYLPDWLEDTLSEGIRQWWKLKPGPPPPKPAERHKDDSRGLVLPGYKYLGPFNGLDKGEPVNEADAAALEHDKAYDRQLDSGDNPYLKYNHADAEFQERLKEDTSFGGNLGRAVFQAKKRVLEPLGLVEEPVKTAPGKKRPVEHSPVEPDSSSGTGKAGQQPARKRLNFGQTGDADSVPDPQPLGQPPAAPSGLGTNTMATGSGAPMADNNEGADGVGNSSGNWHCDSTWMGDRVITTSTRTWALPTYNNHLYKQISSQSGASNDNHYFGYSTPWGYFDFNRFHCHFSPRDWQRLINNNWGFRPKRPNFKLFNIQVKEVTQNDGTTTIANNLTSTVQVFTDSEYQLPYVLGSAHQGCLPPFPADVFMVPQYGYLTLNNGSQAVGRSSFYCLEYFPSQMLRTGNNFTFSYTFEDVPFHSSYAHSQSLDRLMNPLIDQYLYYLSRTNTPSGTTTQSRLQFSQAGASDIRDQSRNWLPGPCYRQQRVSKTSADNNNSEYSWTGATKYHLNGRDSLVNPGPAMASHKDDEEKFFPQSGVLIFGKQGSEKTNVDIEKVMTTDEEEIRTTNPVATEQYGSVSTNLQRGNRQAATADVNTQGVLPGMVWQDRDVYLQGPIWAKIPHTDGHFHPSPLMGGFGLKHPPPQILIKNTPVPANPSTTFSAAKFASFITQYSTGQVSVEIEWELQKENSKRWNPEIQYTSNYNKSVNVDFTVDTNGVYSEPRPIGTRYLTRNL

SEQ ID NO: 4032 - protein, 735 aa, Artificial Sequence
  source: /note="Description of Artificial Sequence: Synthetic polypeptide"
MAADGYLPDWLEDTLSEGIRQWWKLKPGPPPPKPAERHKDDSRGLVLPGYKYLGPFNGLDKGEPVNEADAAALEHDKAYDRQLDSGDNPYLKYNHADAEFRERLKEDTSFGGNLGRAVFQAKKRVLEPLGLVEEPVKTAPGKKRPVEHSPVEPDSSSGTGKAGQQPARKRLNFGQTGDADSVPDPQPLGQPPAAPSGLGTNTMATGSGAPMADNNEGADGVGNSSGNWHCDSTWMGDRVITTSTRTWALPTYNNHLYKQISSQSGASNDNHYFGYSTPWGYFDFNRFHCHFSPRDWQRLINNNWGFRPKRLNFKLFNIQVKEVTQNDGTTTIANNLTSTVQVFTDSEYQLPYVLGSAHQGCLPPFPADVFMVPQYGYLTLNNGSQAVGRSSFYCLEYFPSQMLRTGNNFTFSYTFEDVPFHSSYAHSQSLDRLMNPLIDQYLYYLSRTNTPSGTTTQSRLQFSQAGASDIRDQSRNWLPGPCYRQQRVSKTSADNNNSEYSWTGATKYHLNGRDSLVNPGPAMASHKDDEEKFFPQSGVLIFGKQGSEKTNVDIEKVMTTDEEEIRTTNPVATEQYGSVSTNLQRGNRQAATADVNTQGVLPGMVWQDRDVYLQGPIWAKIPHTDGHFHPSPLMGGFGLKHPPPQILIKNTPVPANPSTTFSAAKFASFITQYSTGQVSVEIEWELQKENSKRWNPEIQYTSNYNKSVNVDFTVDTNGVYSEPRPIGTRYLTRNL

SEQ ID NO: 4033 - protein, 735 aa, Artificial Sequence
  source: /note="Description of Artificial Sequence: Synthetic polypeptide"
MAADGYLPDWLEDTLSEGIRQWWKLKPGPPPPKPAERHKDDSRGLVLPGYKYLGPFNGLDKGEPVNEADAAALEHDKAYDRQLDSGDNPYLKYNHADAEFQERLKEDTSFGGNLGRAVFQAKKRVLEPLGLVEEPVKTAPGKKRPVEHSPVEPDPSSGTGKAGQQPARKRLNFGQTGDADSVPDPQPLGQPPAAPSGLGTNTMATGSGAPMADNNEGADGVGNSSGNWHCDSTWMGDRVITTSTRTWALPTYNNHLYKQISSQSGASNDNHYFGYSTPWGYFDFNRFHCHFSPRDWQRLINNNWGFRPKRLNFKLFNIQVKEVTQNDGTTTIANNLTSTVQVFTDSEYQLPYVLGSAHQGCLPPFPADVFMVPQYGYLTLNNGSQAVGRSSFYCLEYFPSQMLRTGNNFTFSYTFEDVPFHSSYAHSQSLDRLMNPLIDQYLYYLSRTNTPSGTTTQSRLQFSQAGASDIRDQSRNWLPGPCYRQQRVSKTSADNNNSEYSWTGATKYHLNGRDSLVNPGPAMASHKDDEEKFFPQSGVLIFGKQGSEKTNVDIEKVMITDEEEIRTTNPVATEQYGSVSTNLQRGNRQAATADVNTQGVLPGMVWQDRDVYLQGPIWAKIPHTDGHFHPSPLMGGFGLKHPPPQILIKNTPVPANPSTTFSAAKFASFITQYSTGQVSVEIEWELQKENSKRWNPEIQYTSNYNKSVNVDFTVDTNGVYSEPRPIGTRYLTRNL

SEQ ID NO: 4034 - protein, 735 aa, Artificial Sequence
  source: /note="Description of Artificial Sequence: Synthetic polypeptide"
MAADGYLPDWLEDTLSEGIRQWWKLKPGPPPPKPAERHKDDSRGLVLPGYKYLGPFNGLDKGEPVNEADAAALEHDKAYDRQLDSGDNPYLKYNHADAEFQERLKEDTSFGGNLGRAVFQAKKRVLEPLGLVEEPVKTAPGKKRPVEHSPVEPDSSSGTGKAGQQPARKRLNFGQTGDADSVPDPQPLGQPPAAPSGLGTNTMATGSGAPMADNNEGADGVGNSSGNWHCDSTWMGDRVITTSTRTWALPTYNNHLYKQISSQSGASNDNHYFGYSTPWGYFDFNRFHCHFSPRDWQRLINNNWGFRPKRLNFKLFNIQVKEVTQNDGTTTIANNLTSTVQVFTDSEYQLPYVLGSAHQGCLPPFPADVFMVPQYGYLTLNNGSQAVGRSSFYCLEYFPSQMLRTGNNFTFSYTFEDVPFHSSYAHSQSLDRLMNPLIDQYLYYLSRTNTPSGTTTQSRLQFSQAGASDIRDQSRNWLPGPCYRQQRVSKTSADNNNSEYSWTGATKYHLNGRDSLVNPGPAMASHKDDEEKFFPQSGVLIFGKQGSEKTNVDIEKVMITDEEEIRTTNPVATEQYGSVSTNLQRGNRQAATADVNTQGVLPGMVWQDRDVYLQGPIWAKIPHTDGHFHPSPLMGGFGLKHPPPQILIKNTPVPANPSTTFSAAKFASFITQYSTGQVSVEIEWELQKENSKRWNPEIQYTSNYNKSVNVDFTVDTNGVYSESRPIGTRYLTRNL

SEQ ID NO: 4035 - protein, 735 aa, Artificial Sequence
  source: /note="Description of Artificial Sequence: Synthetic polypeptide"
MAADGYLPDWLEDTLSEGIRQWWKLKPGPPPPKPAERHKDDSRGLVLPGYKYLGPFNGLDKGEPVNEADAAALEHDKAYDRQLDSGDNPYLKYNHADAEFQERLKEDTSFGGNLGRAVFQAKKRVLEPLGLVEEPVKTAPGKKRPVEHSPVEPDSSSGTGKAGQQPARKRLNFGQTGDADSVPDPQPLGQPPAAPSGLGTNTMATGSGAPMADNNEGADGVGNSSGNWHCDSTWMGDRVITTSTRTWALPTYNNHLYKQISSQSGASNDNHYFGYSTPWGYFDFNRFHCHFSPRDWQRLINNNWGFRPKRLNFKLFNIQVKEVTQNDGTTTIANNLTSTVQVFTDSEYQLPYVLGSAHQGCLPPFPADVFMVPQYGYLTPNNGSQAVGRSSFYCLEYFPSQMLRTGNNFTFSYTFEDVPFHSSYAHSQSLDRLMNPLIDQYLYYLSRTNTPSGTTTQSRLQFSQAGASDIRDQSRNWLPGPCYRQQRVSKTSADNNNSEYSWTGATKYHLNGRDSLVNPGPAMASHKDDEEKFFPQSGVLIFGKQGSEKTNVDIEKVMITDEEEIRTTNPVATEQYGSVSTNLQRGNRQAATADVNTQGVLPGMVWQDRDVYLQGPIWAKIPHTDGHFHPSPLMGGFGLKHPPPQILIKNTPVPANPSTTFSAAKFASFITQYSTGQVSVEIEWELQKENSKRWNPEIQYTSNYNKSVNVDFTVDTNGVYSEPRPIGTRYLTRNL

SEQ ID NO: 4036 - protein, 735 aa, Artificial Sequence
  source: /note="Description of Artificial Sequence: Synthetic polypeptide"
MAADGYLPDWLEDTLSEGIRQWWKLKPGPPPPKPAERHKDDSRGLVLPGYKYLGPFNGLDKGEPVNEADAAALEHDKAYDRQLDSGDNPYLKYNHADAEFQERLKEDTSFGGNLGRAVFQAKKRVLEPLGLVEEPVKTAPGKKRPVEHSPVEPDSSSGTGKAGQQPARKRLNFGQTGDADSVPDPQPLGQPPAAPSGLGTNTMATGSGAPMADNNEGADGVGNSSGNWHCDSTWMGDRVITTSTRTWALPTYNNHLYKQISSQSGASNDNHYFGYSTPWGYFDFNRFHCHFSPRDWQRLINNNWGFRPKRLNFKLFNIQVKEVTQNDGTTTIANNLTSTVQVFTDSEYQLPYVLGSAHQGCLPPFPADVFMVPQYGYLTLNNGSQAVGRSSFYCLEYFPSQMLRTGNNFTFSYTFEDVPFHSSYAHSQSLDRLMNPLIDQYLYYLSRTNTPSGTTTQSRLQFSQAGASDIRDQSRNWLPGPCYRQQRVSKTSADNNNSEYSWTGATKYHLNGRDSLVNPGPAMASHKDDEEKFFPQSGVLIFGKQGSEKTNVDIEKVMITDEEEIRTTNPVATEQYGSVSTNLQRGNRQAATADVNTQGVLPGMAWQDRDVYLQGPIWAKIPHTDGHFHPSPLMGGFGLKHPPPQILIKNTPVPANPSTTFSAAKFASFITQYSTGQVSVEIEWELQKENSKRWNPEIQYTSNYNKSVNVDFTVDTNGVYSEPRPIGTRYLTRNL

SEQ ID NO: 4037 - protein, 735 aa, Artificial Sequence
  source: /note="Description of Artificial Sequence: Synthetic polypeptide"
MAADGYLPDWLEDTLSEGIRQWWKLKPGPPPPKPAERHKDDSRGLVLPGYKYLGPFNGLDKGEPVNEADAAALEHDKAYDRQLDSGDNPYLKYNHADAEFQERLKEDTSFGGNLGRAVFQAKKRVLEPLGLVEEPVKTAPGKKRPVEHSPVEPDSSSGTGKAGQQPARKRLNFGQTGDADSVPDPQPLGQPPAAPTSLGSTTMATGSGAPMADNNEGADGVGNSSGNWHCDSQWLGDRVITTSTRTWALPTYNNHLYKQISSQSGASNDNHYFGHSTPWGYFDFNRFHCHFSPRDWQRLINNNWGFRPKRLNFKLFNIQVKEVTQNDGTTTIANNLTSTVQVFTDSEYQLPYVLGSAHQGCLPPFPADVFMVPQYGYLTLNNGSQAVGRSSFYCLEYFPSQMLRTGNNFTFSYTFEDVPFHSSYAHSQSLDRLMNPLIDQYLYYLSRTNTPSGTTTQSRLQFSQAGASDIRDQSRNWLPGPCYRQQRVSKTSADNNNSEYSWTGATKYHLNGRDSLVNPGPAMASHKDDEEKFFPQSGVLIFGKQGSEKTNVDIEKVMITDEEEIRTTNPVATEQYGSVSTNLQRGNRQAATADVNTQGVLPGMVWQDRDVYLQGPIWAKIPHTDGHFHPSPLMGGFGLKHPPPQILIKNTPVPANPSTTFSAAKFASFITQYSTGQVSVEIEWELQKENSKRWNPEIQYTSNYNKSVNVDFTVDTNGVYSEPRPIGTRYLTRNL

SEQ ID NO: 4038 - protein, 735 aa, Artificial Sequence
  source: /note="Description of Artificial Sequence: Synthetic polypeptide"
MAADGYLPDWLEDTLSEGIRQWWKLKPGPPPPKPAERHKDDSRGLVLPGYKYLGPFNGLDKGEPVNEADAAALEHDKAYDRQLDSGDNPYLKYNHADAEFQERLKEDTSFGGNLGRAVFQAKKRVLEPLGLVEEPVKTAPGKKRPVEHSPVEPDSSSGTGKAGQQPARKRLNFGQTGDADSVPDPQPLGQPPAAPSGLGTNTMATGSGAPMADNNEGADGVGNSSGNWHCDSTWMGDRVITTSTRTWALPTYNNHLYKQISSQSGASNDNHYFGYSTPWGYFDFNRFHCHFSPRDWQRLINNNWGFRPKRLNFKLFNIQVKEVTQNDGTTTIANNLTSTVQVFTDSEYQLPYVLGSAHQGCLPPFPADVFMVPQYGYLTLNNGSQAVGRSSFYCLEYFPSQMLRTGNNFTFSYTFEDVPFHSSYAHSQSLDRLMNPLIDQYLYYLSRTNTPSGTTTQSRLQFSQAGASDIRDQSRNWLPGPCYRQQRVSKTSADNNNSEYSWTGATKYHLNGRDSLVNPGPAMASHKDDEEKFFPQSGVLIFGKQGSEKTNVDIEKVMITDEEEIRTTNPVATEQYGSVSTNLQRGNRQAATADVNTQGVLPGMVWQDRDVYLQGPIWAKIPHTDGHFHPSPLMGGFGLKHPPPQILIKNTPVPANPSTTFSAAKFASFITQYSTGQASVEIEWELQKENSKRWNPEIQYTSNYNKSVNVDFTVDTNGVYSEPRPIGTRYLTRNL

SEQ ID NO: 4039 - protein, 735 aa, Artificial Sequence
  source: /note="Description of Artificial Sequence: Synthetic polypeptide"
MAADGYLPDWLEDTLSEGIRQWWKLKPGPPPPKPAERHKDDSRGLVLPGYKYLGPFNGLDKGEPVNEADAAALEHDKAYDRQLDSGDNPYLKYNHADAEFQERLKEDTSFGGNLGRAVFQAKKRVLEPLGLVEEPVKTAPGKKRPVEHSPVEPDSSSGTGKAGQQPARKRLNFGQTGDADSVPDPQPLGQPPAAPSGLGTNTMATGSGAPMADNNEGADGVGNSSGNWHCDSTWMGDRVITTSTRTWALPTYNNHLYKQISSQSGASNDNHYFGYSTPWGYFDFNRFHCHFSPRDWQRLINNNWGFRPKRLNFKLFNIQVKEVTQNDGTTTIANNLTSTVQVFTDSEYQLPYVLGSAHQGCLPPFPADVFMVPQYGYLTLNNGSQAVGRSSFYCLEYFPSQMLRTGNNFTFSYTFEDVPFHSSYAHSQSLDRLMNPLIDQYLYYLSRTNTPSGTTTQSRLQFSQAGASDIRDQSRNWLPGPCYRQQRVSKTSADNNNSEYSWTGATKYHLNGRDSLVNPGPAMASHKDDEEKFFPQSGVLIFGKQGSEKTNVDIEKVMITDEEEIRTTNPVATEQYGSVSTNLQRGNRQAATADVNTQGVLPGMVWQDRDVYLQGPIWAKIPHTDGHFHPSPLMGGFGLKHPPPQILIKNTPVPANPSTTFSAARFASFITQYSTGQVSVEIEWELQKENSKRWNPEIQYTSNYNKSVNVDFTVDTNGVYSEPRPIGTRYLTRNL

SEQ ID NO: 4040 - protein, 735 aa, Artificial Sequence
  source: /note="Description of Artificial Sequence: Synthetic polypeptide"
MAADGYLPDWLEDTLSEGIRQWWKLKPGPPPPKPAERHKDDSRGLVLPGYKYLGPFNGLDKGEPVNEADAAALEHDKAYDRQLDSGDNPYLKYNHADAEFQERLKEDTSFGGNLGRAVFQAKKRVLEPLGLVEEPVKTAPGKKRPVEHSPVEPDSSSGTGKAGQQPARKRLNFGQTGGADSVPDPQPLGQPPAAPSGLGTNTMATGSGAPMADNNEGADGVGNSSGNWHCDSTWMGDRVITTSTRTWALPTYNNHLYKQISSQSGASNDNHYFGYSTPWGYFDFNRFHCHFSPRDWQRLINNNWGFRPKRLNFKLFNIQVKEVTQNDGTTTIANNLTSTVQVFTDSEYQLPYVLGSAHQGCLPPFPADVFMVPQYGYLTLNNGSQAVGRSSFYCLEYFPSQMLRTGNNFTFSYTFEDVPFHSSYAHSQSLDRLMNPLIDQYLYYLSRTNTPSGTTTQSRLQFSQAGASDIRDQSRNWLPGPCYRQQRVSKTSADNNNSEYSWTGATKYHLNGRDSLVNPGPAMASHKDDEEKFFPQSGVLIFGKQGSEKTNVDIEKVMITDEEEIRTTNPVATEQYGSVSTNLQRGNRQAATADVNTQGVLPGMVWQDRDVYLQGPIWAKIPHTDGHFHPSPLMGGFGLKHPPPQILIKNTPVPANPSTTFSAAKFASFITQYSTGQVSVEIEWELQKENSKRWNPEIQYTSNYNKSVNVDFTVDTNGVYSEPRPIGTRYLTRNL

SEQ ID NO: 4041 - protein, 735 aa, Artificial Sequence
  source: /note="Description of Artificial Sequence: Synthetic polypeptide"
MAADGYLPDWLEDTLSEGIRQWWKLKPGPPPPKPAERHKDDSRGLVLPGYKYLGPFNGLDKGEPVNEADAAALEHDKAYDRQLDSGDNPYLKYNHADAEFQERLKEDTSFGGNLGRAVFQAKKRVLEPLGLVEEPVKTAPGKKRPVEHSPVEPDSSSGTGKAGQQPARKRLNFGQTGDADSVPDPQPLGQPPAAPSGLGTNTMATGSGAPMADNNEGADGVGNSSGNWHCDSTWMGDRVITTSTRTWALPTYNNHLYKQISSQSGASNDNHYFGYSTPWGYFDFNRFHCHFSPRDWQRLINNNWGFRPKRLNFKLFNIQVKEVTQNDGTTTIANNLTSTVQVFTDSEYQLPYVLGSAHQGCLPPFPADVFMVPQYGYLTLNNGSQAVGRSSFYCLEYFPSQMLRTGNNFTFSYTFEDVPFHSSYAHSQSLDRLMNPLIDQYLYYLSRTNTPSGTTTQSRLQFSQAGASDIRDQSRNWLPGPCYRQQRVSKTSADNNNSEYSWTGATKYHLNGRDSLVNPGPAMASHKDDEEKFFPQSGVLIFGKQGSEKTNVDIEKVMITDEEEIRTTNPVATEQYGSVSTNLQRGNRQAATADVNTQGVLPGMVWQDRDVYLQGPIWAKIPHTDGHFHPSPLMGGFGLKHPPPQILIKNTPVPANPSTTFSAAKFASFITQYSTGQVSVEIEWELQKENSKRWNPEIQYTSNYNKSANVDFTVDTNGVYSEPRPIGTRYLTRNL

SEQ ID NO: 4042 - protein, 735 aa, Artificial Sequence
  source: /note="Description of Artificial Sequence: Synthetic polypeptide"
MAADGYLPDWLEDTLSEGIRQWWKLKPGPPPPKPAERHKDDSRGLVLPGYKYLGPFNGLDKGEPVNEADAAALEHDKAYDRQLDSGDNPYLKYNHADAEFQERLKEDTSFGGNLGRAVFQAKKRVLEPLGLVEEPVKTAPGKKRPVEHSPVEPDSSSGTGKAGQQPARKRLNFGQTGDADSVPDPQPLGQPPAAPSGLGTNTMATGSGAPMADNNEGADGVGNSSGNWHCDSTWMGDRVITTSTRTWALPTYNNHLYKQISSQSGASNDNHYFGYSTPWGYFDFNRFHCHFSPRDWQRLINNNWGFRPKRLNFKLFNIQVKEVTQNDGTTTIANNLTSTVQVFTDSEYQLPYVLGSAHQGCLPPFPADVFMVPQYGYLTLNNGSQAVGRSSFYCLEYFPSQMLRTGNNFTFSYTFEDVPFHSSYAHSQSLDRLMNPLIDQYLYYLSRTNTPSGTTTQSRLQFSQAGASDIRDRSRNWLPGPCYRQQRVSKTSADNNNSEYSWTGATKYHLNGRDSLVNPGPAMASHKDDEEKFFPQSGVLIFGKQGSEKTNVDIEKVMITDEEEIRTTNPVATEQYGSVSTNLQRGNRQAATADVNTQGVLPGMVWQDRDVYLQGPIWAKIPHTDGHFHPSPLMGGFGLKHPPPQILIKNTPVPANPSTTFSAAKFASFITQYSTGQVSVEIEWELQKENSKRWNPEIQYTSNYNKSVNVDFTVDTNGVYSEPRPIGTRYLTRNL

SEQ ID NO: 4043 - protein, 735 aa, Artificial Sequence
  source: /note="Description of Artificial Sequence: Synthetic polypeptide"
MAADGYLPDWLEDTLSEGIRQWWKLKPGPPPPKPAERHKDDSRGLVLPGYKYLGPFNGLDKGEPVNEADAAALEHDKAYDRQLDSGDNPYLKYNHADAEFQERLKEDTSFGGNLGRAVFQAKKRVLEPLGLVEEPVKTAPGKKRPVEHSPVEPDSSSGTGKAGQQPARKRLNFGQTGDADSVPDPQPLGQPPAAPSGLGTNTMATGSGAPMADNNEGADGVGNSSGNWHCDSTWMGDRVITTSTRTWALPTYNNHLYKQISSQSGASNDNHYFGYSTPWGYFDFNRFHCHFSPRDWQRLINNNWGFRPKRLNFKLFNIQVKEVTQNDGTTTIANNLTSTVQVFTDSEYQLPYVLGSAHQGCLPPFPADVFMVPQYGYLTLNNGSQAVGRSSFYCLEYFPSQMLRTGNNFTFSYTFEDVPFHSSYAHSQSLDRLMNPLIDQYLYYLSRTNTPSGTTTQSRLQFSQAGASDIRDQSRNWLPGPCYRQQRVSKASADNNNSEYSWTGATKYHLNGRDSLVNPGPAMASHKDDEEKFFPQSGVLIFGKQGSEKTNVDIEKVMITDEEEIRTTNPVATEQYGSVSTNLQRGNRQAATADVNTQGVLPGMVWQDRDVYLQGPIWAKIPHTDGHFHPSPLMGGFGLKHPPPQILIKNTPVPANPSTTFSAAKFASFITQYSTGQVSVEIEWELQKENSKRWNPEIQYTSNYNKSVNVDFTVDTNGVYSEPRPIGTRYLTRNL

SEQ ID NO: 4044 - protein, 735 aa, Artificial Sequence
  source: /note="Description of Artificial Sequence: Synthetic polypeptide"
MAADGYLPDWLEDTLSEGIRQWWKLKPGPPPPKPAERHKDDSRGLVLPGYKYLGPFNGLDKGEPVNEADAAALEHDKAYDRQLDSGDNPYLKYNHADAEFQERLKEDTSFGGNLGRAVFQAKKRVLEPLGLVEEPVKTAPGKKRPVEHSPVEPDSSSGTGKAGQQPARKRLNFGQTGDADSVPDPQPLGQPPAAPSGLGTNTMATGSGAPMADNNEGADGVGNSSGNWHCDSTWMGDRVITTSTRTWALPTYNNHLYKQISSQSGASNDNHYFGYSTPWGYFDFNRFHCHFSPRDWQRLINNNWGFRPKRLNFKLFNIQVKEVTQNDGTTTIANNLTSTVQVFTDSEYQLPYVLGSAHQGCLPPFPADVFMVPQYGYLTLNNGSQAVGRSSFYCLEYFPSQMLRTGNNFTFSYTFEDVPFHSSYAHSQSLDRLMNPLIDQYLYYLSRTNTPSGTTTQSRLQFSQAGASDIRDQSRNWLPGPCYRQQRVSKTSADNNNSEYSWTGATKHHLNGRDSLVNPGPAMASHKDDEEKFFPQSGVLIFGKQGSEKTNVDIEKVMITDEEEIRTTNPVATEQYGSVSTNLQRGNRQAATADVNTQGVLPGMVWQDRDVYLQGPIWAKIPHTDGHFHPSPLMGGFGLKHPPPQILIKNTPVPANPSTTFSAAKFASFITQYSTGQVSVEIEWELQKENSKRWNPEIQYTSNYNKSVNVDFTVDTNGVYSEPRPIGTRYLTRNL

SEQ ID NO: 4045 - protein, 735 aa, Artificial Sequence
  source: /note="Description of Artificial Sequence: Synthetic polypeptide"
MAADGYLPDWLEDTLSEGIRQWWKLKPGPPPPKPAERHKDDSRGLVLPGYKYLGPFNGLDKGEPVNEADAAALEHDKAYDRQLDSGDNPYLKYNHADAEFQERLKEDTSFGGNLGRAVFQAKKRVLEPLGLVEEPVKTAPGKKRPVEHSPVEPDSSSGTGKAGQQPARKRLNFGQTGDADSVPDPQPLGQPPAAPSGLGTNTMATGSGAPMADNNEGADGVGNSSGNWHCDSTWMGDRVITTSTRTWALPTYNNHLYKQISSQSGASNDNHYFGYSTPWGYFDFNRFHCHFSPRDWQRLINNNWGFRPKRLNFKLFNIQVKEVTQNDGTTTIANNLTGTVQVFTDSEYQLPYVLGSAHQGCLPPFPADVFMVPQYGYLTLNNGSQAVGRSSFYCLEYFPSQMLRTGNNFTFSYTFEDVPFHSSYAHSQSLDRLMNPLIDQYLYYLSRTNTPSGTTTQSRLQFSQAGASDIRDQSRNWLPGPCYRQQRVSKTSADNNNSEYSWTGATKYHLNGRDSLVNPGPAMASHKDDEEKFFPQSGVLIFGKQGSEKTNVDIEKVMITDEEEIRTTNPVATEQYGSVSTNLQRGNRQAATADVNTQGVLPGMVWQDRDVYLQGPIWAKIPHTDGHFHPSPLMGGFGLKHPPPQILIKNTPVPANPSTTFSAAKFASFITQYSTGQVSVEIEWELQKENSKRWNPEIQYTSNYNKSVNVDFTVDTNGVYSEPRPIGTRYLTRNL

SEQ ID NO: 4046 - protein, 735 aa, Artificial Sequence
  source: /note="Description of Artificial Sequence: Synthetic polypeptide"
MAADGYLPDWLEDTLSEGIRQWWKLKPGPPPPKPAERHKDDSRGLVLPGYKYLGPFNGLDKGEPVNEADAAALEHDKAYDRQLDSGDNPYLKYNHADAEFQERLKEDTSFGGNLGRAVFRAKKRVLEPLGLVEEPVKTAPGKKRPVEHSPVEPDSSSGTGKAGQQPARKRLNFGQTGDADSVPDPQPLGQPPAAPSGLGTNTMATGSGAPMADNNEGADGVGNSSGNWHCDSTWMGDRVITTSTRTWALPTYNNHLYKQISSQSGASNDNHYFGYSTPWGYFDFNRFHCHFSPRDWQRLINNNWGFRPKRLNFKLFNIQVKEVTQNDGTTTIANNLTSTVQVFTDSEYQLPYVLGSAHQGCLPPFPADVFMVPQYGYLTLNNGSQAVGRSSFYCLEYFPSQMLRTGNNFTFSYTFEDVPFHSSYAHSQSLDRLMNPLIDQYLYYLSRTNTPSGTTTQSRLQFSQAGASDIRDQSRNWLPGPCYRQQRVSKTSADNNNSEYSWTGATKYHLNGRDSLVNPGPAMASHKDDEEKFFPQSGVLIFGKQGSEKTNVDIEKVMITDEEEIRTTNPVATEQYGSVSTNLQRGNRQAATADVNTQGVLPGMVWQDRDVYLQGPIWAKIPHTDGHFHPSPLMGGFGLKHPPPQILIKNTPVPANPSTTFSAAKFASFITQYSTGQVSVEIEWELQKENSKRWNPEIQYTSNYNKSVNVDFTVDTNGVYSEPRPIGTRYLTRNL

SEQ ID NO: 4047 - protein, 735 aa, Artificial Sequence
  source: /note="Description of Artificial Sequence: Synthetic polypeptide"
MAADGYLPDWLEDTLSEGIRQWWKLKPGPPPPKPAERHKDDSRGLVLPGYKYLGPFNGLDKGEPVNEADAAALEHDKAYDRQLDSGDNPYLKYNHADAEFQERLKEDTSFGGNLGRAVFQAKKRVLEPLGLVEEPVKTAPGKKRPVEHSPVEPDSSSGTGKAGQQPARKRLNFGQTGDADSVPDPQPLGQPPAAPSGLGTNTMATGSGAPMADNNEGADGVGNSSGNWHCDSTWMGDRVITTSTRTWALPTYNNHLYKQISSQSGASNDNHYFGYSTPWGYFDFNRFHCHFSPRDWQRLINNNWGFRPKRLNFKLFNIQVKEVTQNDGTTTIANNLTSTVQVFTDSEYQLPYVLGSAHQGCLPPFPADVFMVPQYGYLTLNNGSQAVGRSSFYCLEYFPSQMLRTGNNFTFSYTFEDVPFHSSYAHSQSLDRLMNPLIDQYLYYLSRTNTPSGTTTQSRLQFSQAGASDIRDQSRNWLPGPCYRQQRVSKTSADNNNSEYSWTGATKYHLNGRDSLVNPGPAMASHKDDEEKFFPQSGVLIFGKQGSEKTNVDIEKVMITDEEEIRTTNPVATEQYGSVSTNLQRGNRQAATADVNTQGVLPGTVWQDRDVYLQGPIWAKIPHTDGHFHPSPLMGGFGLKHPPPQILIKNTPVPANPSTTFSAAKFASFITQYSTGQASVEIEWELQKENSKRWNPEIQYTSNYNKSVNVDFTVDTNGVYSEPRPIGTRYLTRNL

SEQ ID NO: 4048 - protein, 735 aa, Artificial Sequence
  source: /note="Description of Artificial Sequence: Synthetic polypeptide"
MAADGYLPDWLEDTLSEGIRQWWKLKPGPPPPKPAERHKDASRGLVLPGYKYLGPFNGLDKGEPVNEADAAALEHDKAYDRQLDSGDNPYLKYNHADAEFQERLKEDTSFGGNLGRAVFQAKKRVLEPLGLVEEPVKTAPGKKRPVEHSPVEPDSSSGTGKAGQQPARKRLNFGQTGDADSVPDPQPLGQPPAAPTSLGSTTMATGSGAPMADNNEGADGVGNSSGNWHCDSQWLGDRVITTSTRTWALPTYNNHLYKQISSQSGASNDNHYFGYSTPWGYFDFNRFHCHFSPRDWQRLINNNWGFRPKRLNFKLFNIQVKEVTQNDGTTTIANNLTSTVQVFTDSEYQLPYVLGSAHQGCLPPFPADVFMVPQYGYLTLNNGSQAVGRSSFYCLEYFPSQMLRTGNNFTFSYTFEDVPFHSSYAHSQSLDRLMNPLIDQYLYYLSRTNTPSGTTTQSRLQFSQAGASDIRDQSRNWLPGPCYRQQRVSKTSADNNNSEYSWTGATKYHLNGRDSLVNPGPAMASHKDDEEKFFPQSGVLIFGKQGSEKTNVDIEKVMITDEEEIRTTNPVATEQYGSVSTNLQRGNRQAATADVNTQGVLPGMVWQDRDVYLQGPIWAKIPHTDGHFHPSPLMGGFGLKHPPPQILIKNTPVPANPSTTFSAAKFASFITQYSTGQVSVEIEWELQKENSKRWNPEIQYTSNYNKSVNVDFTVDTNGVYSEPRPIGTRYLTRNL

SEQ ID NO: 4049 - protein, 735 aa, Artificial Sequence
  source: /note="Description of Artificial Sequence: Synthetic polypeptide"
MAADGYLPDWLEDTLSEGIRQWWKLKPGPPPPKPAERHKDDSRGLVLPGYKYLGPFNGLDKGEPVNEADAAALEHDKAYDRQLDSGDNPYLKYNHADAEFQERLKEDTSFGGNLGRAVFQAKKRVLEPLGLVEEPVKTAPGKKRPVEHSPVEPDSSSGTGKAGQQPARKRLNFGQTGDADSVPDPQPLGQPPAAPSGLGTNTMATGSGAPMADNNEGADGVGNSSGNWHCDSTWMGDRVITTSTRTWALPTYNNHLYKQISSQSGAPNDNHYFGYSTPWGYFDFNRFHCHFSPRDWQRLINNNWGFRPKRLNFKLFNIQVKEVTQNDGTTTIANNLTSTVQVFTDSEYQLPYVLGSAHQGCLPPFPADVFMVPQYGYLTLNNGSQAVGRSSFYCLEYFPSQMLRTGNNFTFSYTFEDVPFHSSYAHSQSLDRLMNPLIDQYLYYLSRTNTPSGTTTQSRLQFSQAGASDIRDQSRNWLPGPCYRQQRVSKTSADNNNSEYSWTGATKYHLNGRDSLVNPGPAMASHKDDEEKFFPQSGVLIFGKQGSEKTNVDIEKVMITDEEEIRTTNPVATEQYGSVSTNLQRGNRQAATADVNTQGVLPGMVWQDRDVYLQGPIWAKIPHTDGHFHPSPLMGGFGLKHPPPQILIKNTPVPANPSTTFSAAKFASFITQYSTGQASVEIEWELQKENSKRWNPEIQYTSNYNKSVNVDFTVDTNGVYSEPRPIGTRYLTRNL

SEQ ID NO: 4050 - protein, 735 aa, Artificial Sequence
  source: /note="Description of Artificial Sequence: Synthetic polypeptide"
MAADGYLPDWLEDTLSEGIRQWWKLKPGPPPPKPAERHKDDSRGLVLPGYKYLGPFNGLDKGEPVNEADAAALEHDKAYDRQLDSGDNPYLKYNHADAEFQERLKEDTSFGGNLGRAVFQAKKRVLEPLGLVEEPVKTAPGKKRPVEHSPVEPDSSSGTGKAGQQPARKRLNFGQTGDADSVPDPQPLGQPPAAPTSLGSTTMATGSGAPMADNNEGADGVGNSSGNWHCDSQWLGDRVITTSTRTWALPTYNNHLYKQISSQSGASNDNHYFGYSTPWGYFDFNRFHCHFSPRDWQRLINNNWGFRPKRLNFKLFNIQVKEVTQNDGTTTIANNLTSTVQVFTDSEYQLPYVLGSAHQGCLPPFPADVFMVPQYGYLTLNNGSQAVGRSSFYCLEYFPSQMLRTGNNFTFSYTFEDVPFHSSYAHSQSLDRLMNPLIDQYLYYLSRTNTPSGTTTQSRLQFSQAGASDIRDQSRNWLPGPCYRQQRVSKTSADNNNSEYSWTGATKYHLNGRDSLVNPGPAMASHKDDEEKFFPQSGVLIFGKQGSEKTNVDIEKVMITDEEEIRTTNPVATEQYGSVSTNLQRGNRQAATADVNTQGVLPGMVWQDRDVYLQGPIWAKIPHTDGHFHPSPLMGGFGLKHPPPQILIKNTPVPANPSTTFSAAKFASFITQYSTGQVSVEIEWELQKENSKRWNPEIQYTSNYNKSVNVDFTVDTNGVYSEPRPIGTRYLTRNL

SEQ ID NO: 4051 - protein, 735 aa, Artificial Sequence
  source: /note="Description of Artificial Sequence: Synthetic polypeptide"
MAADGYLPDWLEDILSEGIRQWWKLKPGPPPPKPAERHKDASRGLVLPGYKYLGPFNGLDKGEPVNEADAAALEHDKAYDRQLDSGDNPYLKYNHADAEFQERLKEDTSFGGNLGRAVFQAKKRVLEPLGLVEEPVKTAPGKKRPVEHSPVEPDSSSGTGKAGQQPARKRLNFGQTGDADSVPDPQPLGQPPAAPTSLGSTTMATGSGAPMADNNEGADGVGNSSGNWHCDSQWLGDRVITTSTRTWALPTYNNHLYKQISSQSGASNDNHYFGYSTPWGYFDFNRFHCHFSPRDWQRLINNNWGFRPKRLNFKLFNIQVKEVTQNDGTTTIANNLTSTVQVFTDSEYQLPYVLGSAHQGCLPPFPADVFMVPQYGYLTLNNGSQAVGRSSFYCLEYFPSQMLRTGNNFTFSYTFEDVPFHSSYAHSQSLDRLMNPLIDQYLYYLSRTNTPSGTTTQSRLQFSQAGASDIRDQSRNWLPGPCYRQQRVSKTSADNNNSEYSWTGATKYHLNGRDSLVNPGPAMASHKDDEEKFFPQSGVLIFGKQGSEKTNVDIEKVMITDEEEIRTTNPVATEQYGSVSTNLQRGNRQAATADVNTQGVLPGMVWQDRDVYLQGPIWAKIPHTDGHFHPSPLMGGFGLKHPPPQILIKNTPVPANPSTTFSAAKFASFITQYSTGQVSVEIEWELQKENSKRWNPEIQYTSNYNKSVNVDFTVDTNGVYSEPRPIGTRYLTRNL

SEQ ID NO: 4052 - protein, 735 aa, Artificial Sequence
  source: /note="Description of Artificial Sequence: Synthetic polypeptide"
MAADGYLPDWLEDTLSEGIRQWWKLKPGPPPPKPAERHKDASRGLVLPGYKYLGPFNGLDKGEPVNEADAAALEHDKAYDRQLDSGDNPYLKYNHADAEFQERLKEDTSFGGNLGRAVFQAKKRVLEPLGLVEEPVKTAPGKKRPVEHSPVEPDSSSGTGKAGQQPARKRLNFGQTGDADSVPDPQPLGQPPAAPSGLGTNTMATGSGAPMADNNEGADGVGNSSGNWHCDSTWMGDRVITTSTRTWALPTYNNHLYKQISSQSGASNDNHYFGYSTPWGYFDFNRFHCHFSPRDWQRLINNNWGFRPKRLNFKLFNIQVKEVTQNDGTTTIANNLTSTVQVFTDSEYQLPYVLGSAHQGCLPPFPADVFMVPQYGYLTLNNGSQAVGRSSFYCLEYFPSQMLRTGNNFTFSYTFEDVPFHSSYAHSQSLDRLMNPLIDQYLYYLSRTNTPSGTTTQSRLQFSQAGASDIRDQSRNWLPGPCYRQQRVSKTSADNNNSEYSWTGATKYHLNGRDSLVNPGPAMASHKDDEEKFFPQSGVLIFGKQGSEKTNVDIEKVMITDEEEIRTTNPVATEQYGSVSTNLQRGNRQAATADVNTQGVLPGMVWQDRDVYLQGPIWAKIPHTDGHFHPSPLMGGFGLKHPPPQILIKNTPVPANPSTTFSAAKFASFITQYSTGQASVEIEWELQKENSKRWNPEIQYTSNYNKSVNVDFTVDTNGVYSEPRPIGTRYLTRNL

SEQ ID NO: 4053 - protein, 735 aa, Artificial Sequence
  source: /note="Description of Artificial Sequence: Synthetic polypeptide"
MAADGYLPDWLEDTLSEGIRQWWKLKPGPPPPKPAERHKDDSRGLVLPGYKYLGPFNGLDKGEPVNEADAAALEHDKAYDRQLDSGDNPYLKYNHADAEFQERLKEDTSFGGNLGRAVFQAKKRVLEPLGLVEEPVKTAPGKKRPVEHSPVEPDSSSGTGKAGQQPARKRLNFGQTGDADSVPDPQPLGQPPAAPTSLGSTTMATGSGAPMADNNEGADGVGNSSGNWHCDSTWMGDRVITTSTRTWALPTYNNHLYKQISSQSGASNDNHYFGYSTPWGYFDFNRFHCHFSPRDWQRLINNNWGFRPKRLNFKLFNIQVKEVTQNDGTTTIANNLTSTVQVFTDSEYQLPYVLGSAHQGCLPPFPADVFMVPQYGYLTLNNGSQAVGRSSFYCLEYFPSQMLRTGNNFTFSYTFEDVPFHSSYAHSQSLDRLMNPLIDQYLYYLSRTNTPSGTTTQSRLQFSQAGASDIRDQSRNWLPGPCYRQQRVSKTSADNNNSEYSWTGATKYHLNGRDSLVNPGPAMASHKDDEEKFFPQSGVLIFGKQGSEKTNVDIEKVMITDEEEIRTTNPVATEQYGSVSTNLQRGNRQAATADVNTQGVLPGMVWQDRDVYLQGPIWAKIPHTDGHFHPSPLMGGFGLKHPPPQILIKNTPVPANPSTTFSAAKFASFITQYSTGQASVEIEWELQKENSKRWNPEIQYTSNYNKSVNVDFTVDTNGVYSEPRPIGTRYLTRNL

SEQ ID NO: 4054 - protein, 735 aa, Artificial Sequence
  source: /note="Description of Artificial Sequence: Synthetic polypeptide"
MAADGYLPDWLEDTLSEGIRQWWKLKPGPPPPKPAERHKDASRGLVLPGYKYLGPFNGLDKGEPVNEADAAALEHDKAYDRQLDSGDNPYLKYNHADAEFQERLKEDTSFGGNLGRAVFQAKKRVLEPLGLVEEPVKTAPGKKRPVEHSPVEPDSSSGTGKAGQQPARKRLNFGQTGDADSVPDPQPLGQPPAAPSGLGTNTMATGSGAPMADNNEGADGVGNSSGNWHCDSTWMGDRVITTSTRTWALPTYNNHLYKQISSQSGASNDNHYFGYSTPWGYFDFNRFHCHFSPRDWQRLINNNWGFRPKRLNFKLFNIQVKEVTQNDGTTTIANNLTSTVQVFTDSEYQLPYVLGSAHQGCLPPFPADVFMVPQYGYLTLNNGSQAVGRSSFYCLEYFPSQMLRTGNNFTFSYTFEDVPFHSSYAHSQSLDRLMNPLIDQYLYYLSRTNTPSGTTTQSRLQFSQAGASDIRDQSRNWLPGPCYRQQRVSKTSADNNNSEYSWTGATKYHLNGRDSLVNPGPAMASHKDDEEKFFPQSGVLIFGKQGSEKTNVDIEKVMITDEEEIRTTNPVATEQYGSVSTNLQRGNRQAATADVNTQGVLPGMVWQDRDVYLQGPIWAKIPHTDGHFHPSPLMGGFGLKHPPPQILIKNTPVPANPSTTFSAAKFASFITQYSTGQVSVEIEWELQKENSKRWNPEIQYTSNYNKSVNVDFTVDTNGVYSEPRPIGTRYLTRNL

SEQ ID NO: 4055 - protein, 735 aa, Artificial Sequence
  source: /note="Description of Artificial Sequence: Synthetic polypeptide"
MAADGYLPDWLEDTLSEGIRQWWKLKPGPPPPKPAERHKDASRGLVLPGYKYLGPFNGLDKGEPVNEADAAALEHDKAYDRQLDSGDNPYLKYNHADAEFQERLKEDTPFGGNLGRAVFQAKKRVLEPLGLVEEPVKTAPGKKRPVEHSPVEPDSSSGTGKAGQRPARKRLNFGQTGDADSVPDPQPLGQPPAAPTSLGSTTMATGSGAPMADNNEGADGVGNSSGNWHCDSQWLGDRVITTSTRTWALPTYNNHLYKQIPSQSGASNDNHYFGYSTPWGYFDFNRFHCHFSPRDWQRLINNNWGFRPKRLNFKLFNIQVKEVTQNDGTTTIANNLTSTVQVFTDSEYQLPYVLGSAHQGCLPPFPADVFMVPQYGYLTLNNGSQAVGRSSFYCLEYFPSQMLRTGNNFTFSYTFEDVPFHSSYAHSQSLDRLMNPLIDQYLYYLSRTNTPSGTTTQSRLQFSQAGASDIRDQSRNWLPGPCYRQQRVSKTSADNNNSEYSWTGATKYHLNGRDSLVNPGPAMASHKDDEEKFFPQSGVLIFGKQGSEKTNVDIEKVMITDEEEIRTTNPVATEQYGSVSTNLQRGNRQAATADVNTQGVLPGMVWQDRDVYLQGPIWAKIPHTDGHFHPSPLMGGFGLKHPPPQILIKNTPVPANPSTTFSAAKFASFITQYSTGQASVEIEWELQKENSKRWNPEIQYTSNYNKSVNVDFTVDTNGVYSEPRPIGTRYLTRNL

SEQ ID NO: 4056 - protein, 735 aa, Artificial Sequence
  source: /note="Description of Artificial Sequence: Synthetic polypeptide"
MAADGYLPDWLEDTLSEGIRQWWKLKPGPPPPKPAERHKDDSRGLVLPGYKYLGPFNGLDKGEPVNEADAAALEHDKAYDRQLDSGDNPYLKYNHADAEFQERLKEDTSFGGNLGRAVFQAKKRVLEPLGLVEEPVKTAPGKKRPVEHSPVEPDSSSGTGKAGQQPARKRLNFGQTGDADSVPDPQPLGQPPAAPTSLGSTTMATGSGAPMADNNEGADGVGNSSGNWHCDSTWMGDRVITTSTRTWALPTYNNHLYKQISSQSGASNDNHYFGYSTPWGYFDFNRFHCHFSPRDWQRLINNNWGFRPKRLNFKLFNIQVKEVTQNDGTTTIANNLTSTVQVFTDSEYQLPYVLGSAHQGCLPPFPADVFMVPQYGYLTLNNGSQAVGRSSFYCLEYFPSQMLRTGNNFTFSYTFEDVPFHSSYAHSQSLDRLMNPLTDQYLYYLSRTNTPSGTTTQSRLQFSQAGASDIRDQSRNWLPGPCYRQQRVSKTSADNNNSEYSWTGATKYHLNGRDSLVNPGPAMASHKDDEEKFFPQSGVLIFGKQGSEKTNVDIEKVMITDEEEIRTTNPVATEQYGSVSTNLQRGNRQAATADVNTQGVLPGMVWQDRDVYLQGPIWAKIPHTDGHFHPSPLMGGFGLKHPPPQILIKNTPVPANPSTTFSAAKFASFITQYSTGQVSVEIEWELQKENSKRWNPEIQYTSNYNKSVNVDFTVDTNGVYSEPRPIGTRYLTRNL

SEQ ID NO: 4057 - protein, 735 aa, Artificial Sequence
  source: /note="Description of Artificial Sequence: Synthetic polypeptide"
MAADGYLPDWLEDTLSEGIRQWWKLKPGPPPPKPAERHKDDSRGLVLPGYKYLGPFNGLDKGEPVNEADAAALEHDKAYDRQLDSGDNPYLKYNHADAEFQERLKEDTSFGGNLGRAVFQAKKRVLEPLGLVEEPVKTAPGKKRPVEHSPVEPDSSSGTGKAGQQPARKRLNFGQTGDADSVPDPQPLGQPPAAPSGLGTNTMATGSGAPMADNNEGADGVGNSSGNWHCDSTWMGDRVITTSTRTWALPTYNNHLYKQISSQSGASNDNHYFGYSTPWGYFDFNRFHCHFSPRDWQRLINNNWGFRPKRLNFKLFNIQVKEVTQNDGTTTIANNLTSTVQVFTDSEYQLPYVLGSAHQGCLPPFPADVFMVPQYGYLTLNNGSQAVGRSSFYCLEYFPSQMLRTGNNFTFSYTFEDVPFHSSYAHSQSLDRLMNPLIDQYLYYLSRTNTPSGTTAQSRLQFSQAGASDIRDQSRNWLPGPCYRQQRVSKTSADNNNSEYSWTGATKYHLNGRDSLVNPGPAMASHKDDEEKFFPQSGVLIFGKQGSEKTNVDIEKVMITDEEEIRTTNPVATEQYGSVSTNLQRGNRQAATADVNTQGVLPGMVWQDRDVYLQGPIWAKIPHTDGHFHPSPLMGGFGLKHPPPQILIKNTPVPANPSTTFSAAKFASFITQYSTGQVSVEIEWELQKENSKRWNPEIQYTSNYNKSVNVDFTVDTNGVYSEPRPIGTRYLTRNL

SEQ ID NO: 4058 - protein, 735 aa, Artificial Sequence
  source: /note="Description of Artificial Sequence: Synthetic polypeptide"
MAADGYLPDWLEDTLSEGIRQWWKLKPGPPPPKPAERHKDDSRGLVLPGYKYLGPFNGLDKGEPVNEADAAALEHDKAYDRQLDSGDNPYLKYNHADAEFQERLKEDTSFGGNLGRAVFQAKKRVLEPLGLVEEPVKTAPGKKRPVEHSPVEPDSSSGTGKAGQQPARKRLNFGQTGDADSVPDPQPLGQPPAAPSGLGTNTMATGSGAPMADNNEGADGVGNSSGNWHCDSTWMGDRVITTSTRTWALPTYNNHLYKQISSQSGASNGNHYFGYSTPWGYFDFNRFHCHFSPRDWQRLINNNWGFRPKRLNFKLFNIQVKEVTQNDGTTTIANNLTSTVQVFTDSEYQLPYVLGSAHQGCLPPFPADVFMVPQYGYLTLNNGSQAVGRSSFYCLEYFPSQMLRTGNNFTFSYTFEDVPFHSSYAHSQSLDRLMNPLIDQYLYYLSRTNTPSGTTTQSRLQFSQAGASDIRDQSRNWLPGPCYRQQRVSKTSADNNNSEYSWTGATKYHLNGRDSLVNPGPAMASHKDDEEKFFPQSGVLIFGKQGSEKTNVDIEKVMITDEEEIRTTNPVATEQYGSVSTNLQRGNRQAATADVNTQGVLPGMVWQDRDVYLQGPIWAKIPHTDGHFHPSPLMGGFGLKHPPPQILIKNTPVPANPSTTFSAAKFASFITQYSTGQVSVEIEWELQKENSKRWNPEIQYTSNYNKSVNVDFTVDTNGVYSEPRPIGTRYLTRNL

SEQ ID NO: 4059 - protein, 735 aa, Artificial Sequence
  source: /note="Description of Artificial Sequence: Synthetic polypeptide"
MAADGYLPDWLEDTLSEGIRQWWKLKPGPPPPKPAERHKDDSRGLVLPGYKYLGPFNGLDKGEPVNEADAAALEHDKAYDRQLDSGDNPYLKYNHADAEFQERLKEDTSFGGNLGRAVFQAKKRVLEPLGLVEEPVKTAPGKKRPVEHSPVEPDSSSGTGKAGQQPARKRLNFGQTGDADSVPDPQPLGQPPAAPSGLGTNTMATGSGAPMADNNEGADGVGNSSGNWHCDSTWMGDRVITTSTRTWALPTYNNHLYKQISSQSGASNDNHYFGYSTPWGYFDFNRFHCHFSPRDWQRLINNNWGFRPKRLNFKLFNIQVKEVTQNDGTTTIANNLTSTVQVFTDSEYQLPYVLGSAHQGCLPPFPADVFMVPQYGYLTLNNGSQAVGRSSFYCLEYFPSQMLRTGNNFTFSYTFEDVPFHSSYAHSQSLDRLMNPLIDQYLYYLSRTNTPSGTTTQSRLQFSQAGASDIRDQSRNWLPGPCYRQQRVSKTSADNNNSEYSWTGATKYHLNGRDSLVNPGPAMASHKDDEEKFFPQSGVLIFGKQGSEKTNVDIERVMITDEEEIRTTNPVATEQYGSVSTNLQRGNRQAATADVNTQGVLPGMVWQDRDVYLQGPIWAKIPHTDGHFHPSPLMGGFGLKHPPPQILIKNTPVPANPSTTFSAAKFASFITQYSTGQVSVEIEWELQKENSKRWNPEIQYTSNYNKSVNVDFTVDTNGVYSEPRPIGTRYLTRNL

SEQ ID NO: 4060 - protein, 735 aa, Artificial Sequence
  source: /note="Description of Artificial Sequence: Synthetic polypeptide"
MAADGYLPDWLEDTLSEGIRQWWKLKPGPPPPKPAERHKDDSRGLVLPGYKYLGPFNGLDKGEPVNEADAAALEHDKAYDRQLDSGDNPYLKYNHADAEFQERLKEDTSFGGNLGRAVFQAKKRVLEPLGLVEEPVKTAPGKKRPVEHSPVEPDSSSGTGKAGQQPARKRLNFGQTGDADSVPDPQPLGQPPAAPSGLGTNTMATGSGAPMADNNEGADGVGNSSGNWHCDSTWMGDRVITTSTRTWALPTYNNHLYKQISSQSGASNDNHCFGYSTPWGYFDFNRFHCHFSPRDWQRLINNNWGFRPKRLNFKLFNIQVKEVTQNDGTTTIANNLTSTVQVFTDSEYQLPYVLGSAHQGCLPPFPADVFMVPQYGYLTLNNGSQAVGRSSFYCLEYFPSQMLRTGNNFTFSYTFEDVPFHSSYAHSQSLDRLMNPLIDQYLYYLSRTNTPSGTTTQSRLQFSQAGASDIRDQSRNWLPGPCYRQQRVSKTSADNNNSEYSWTGATKYHLNGRDSLVNPGPAMASHKDDEEKFFPQSGVLIFGKQGSEKTNVDIEKVMITDEEEIRTTNPVATEQYGSVSTNLQRGNRQAATADVNTQGVLPGMVWQDRDVYLQGPIWAKIPHTDGHFHPSPLMGGFGLKHPPPQILIKNTPVPANPSTTFSAAKFASFITQYSTGQVSVEIEWELQKENSKRWNPEIQYTSNYNKSVNVDFTVDTNGVYSEPRPIGTRYLTRNL

SEQ ID NO: 4061 - protein, 735 aa, Artificial Sequence
  source: /note="Description of Artificial Sequence: Synthetic polypeptide"
MAADGYLPDWLEDTLSEGIRQWWKLKPGPPPPKPAERHKDDSRGLVLPGYKYLGPFNGLDKGEPVNEADAAALEHDKAYDRQLDSGDNPYLKYNHADAEFQERLKEDTSFGGNLGRAVFQAKKRVLEPLGLVEEPVKTAPGKKRPVEHSPVEPDSSSGTGKAGQQPARKRLNFGQTGDADSVPDPQPLGQPPAAPSGLGTNTMATGSGAPMADNNEGADGVGNSSGNWHCDSTWMGDRVITTSTRTWALPTYNNHLYKQISSQSGASNDNHYFGYSTPWGYFDFNRFHCHFSPRDWQRLINNNWGFRPKRLNFKLFNIQVKEVTQNDGTTTIANNLTSTVQVFTDSEYQLPYVLGSAHQGCLPPFPADVFMVPQYGYLTLNNGSQAVGRSSFYCLEYFPSQMLRTGNNFTFSYTFEDVPFHSSYAHSQSLDRLMNPLIDQYLYYLSRTNTPSGTTTQSRLQFSQAGASDIRDQSRNWLPGPCYRQQRVSKTSADNNNSEYSWTGATKYHLNGRDSLVNPGPAMASHKDDEEKFFPQSGVLIFGKQGSEKTNVDIEKVMITDEEEIRTTNPVATEQYGSVSTNLQRGNRQAATADVNTQGVLPGMVWQDRDVYLQGPIWAKIPHTDGHFHPSPLMGGFGLKHPPPQILIKNTPVPANPSTTFSAAKFASFITQYSTGQVSVEIEWELQKENSKRWNPEIQYTSNYNKSVNADFTVDTNGVYSEPRPIGTRYLTRNL

SEQ ID NO: 4062 - protein, 735 aa, Artificial Sequence
  source: /note="Description of Artificial Sequence: Synthetic polypeptide"
MAADGYLPDWLEDTLSEGIRQWWKLKPGPPPPKPAERHRDDSRGLVLPGYKYLGPFNGLDKGEPVNEADAAALEHDKAYDRQLDSGDNPYLKYNHADAEFQERLKEDTSFGGNLGRAVFQAKKRVLEPLGLVEEPVKTAPGKKRPVEHSPVEPDSSSGTGKAGQQPARKRLNFGQTGDADSVPDPQPLGQPPAAPSGLGTNTMATGSGAPMADNNEGADGVGNSSGNWHCDSTWMGDRVITTSTRTWALPTYNNHLYKQISSQSGASNGNHYFGYSTPWGYFDFNRFHCHFSPRDWQRLINNNWGFRPKRLNFKLFNIQVKEVTQNDGTTTIANNLTSTVQVFTDSEYQLPYVLGSAHQGCLPPFPADVFMVPQYGYLTLNNGSQAVGRSSFYCLEYFPSQMLRTGNNFTFSYTFEDVPFHSSYAHSQSLDRLMNPLIDQYLYYLSRTNTPSGTTTQSRLQFSQAGASDIRDQSRNWLPGPCYRQQRVSKTSADNNNSEYSWTGATKYHLNGRDSLVNPGPAMASHKDDEEKFFPQSGVLIFGKQGSEKTNVDIEKVMITDEEEIRTTNPVATEQYGSVSTNLQRGNRQAATADVNTQGVLPGMVWQDRDVYLQGPIWAKIPHTDGHFHPSPLMGGFGLKHPPPQILIKNTPVPANPSTTFSAAKFASFITQYSTGQVSVEIEWELQKENSKRWNPEIQYTSNYNKSVNVDFTVDTNGVYSEPRPIGTRYLTRNL

SEQ ID NO: 4063 - protein, 735 aa, Artificial Sequence
  source: /note="Description of Artificial Sequence: Synthetic polypeptide"
MAADGYLPDWLEDTLSEGIRQWWKLKPGPPPPKPAERHKDDSRGLVLPGYKYLGPFNGLDKGEPVNEADAAALEHDKAYDRQLDSGDNPYLKYNHADAEFQERLKEDTSFGGNLGRAVFQAKKRVLEPLGLVEEPVKTAPGKKRPVEHSPVEPDSSSGTGKAGQQPARKRLNFGQTGDADSVPDPQPLGQPPAAPSGLGTNTMATGSGAPMADNNEGADGVGNSSGNWHCDSTWMGDRVITTSTRTWALPTYNNHLYKQISSQSGASNDNHYFGYSTPWGYFDFNRFHCHFSPRDWQRLINNNWGFRPKRLNFKLFNIQVKEVTQNDGTTTIANNLTSTVQVFTDSEYQLPYVLGSAHQGCLPPFPADVFMVPQYGYLTLNNGSRAVGRSSFYCLEYFPSQMLRTGNNFTFSYTFEDVPFHSSYAHSQSLDRLMNPLIDQYLYYLSRTNTPSGTTTQSRLQFSQAGASDIRDQSRNWLPGPCYRQQRVSKASADNNNSEYSWTGATKYHLNGRDSLVNPGPAMASHKDDEEKFFPQSGVLIFGKQGSEKTNVDIEKVMITDEEEIRTTNPVATEQYGSVSTNLQRGNRQAATADVNTQGVLPGMVWQDRDVYLQGPIWAKIPHTDGHFHPSPLMGGFGLKHPPPQILIKNTPVPANPSTTFSAAKFASFITQYSTGQVSVEIEWELQKENSKRWNPEIQYTSNYNKSVNVDFTVDTNGVYSEPRPIGTRYLTRNL

SEQ ID NO: 4064 - protein, 735 aa, Artificial Sequence
  source: /note="Description of Artificial Sequence: Synthetic polypeptide"
MAADGYLPDWLEDTLSEGIRQWWKLKPGPPPPKPAERHRDDSRGLVLPGYKYLGPFNGLDKGEPVNEADAAALEHDKAYDRQLDSGDNPYLKYNHADAEFQERLKEDTSFGGNLGRAVFQAKKRVLEPLGLVEEPVKTAPGKKRPVEHSPVEPDSSSGTGKAGQQPARKRLNFGQTGDADSVPDPQPLGQPPAAPSGLGTNTMATGSGAPMADNNEGADGVGNSSGNWHCDSTWMGDRVITTSTRTWALPTYNNHLYKQISSQSGASNGNHYFGYSTPWGYFDFNRFHCHFSPRDWQRLINNNWGFRPKRLNFKLFNIQVKEVTQNDGTTTIANNLTSTVQVFTDSEYQLPYVLGSAHQGCLPPFPADVFMVPQYGYLTLNNGSQAVGRSSFYCLEYFPSQMLRTGNNFTFSYTFEDVPFHSSYAHSQSLDRLMNPLIDQYLYYLSRTNTPSGTTTQSRLQFSQAGASGIRDQSRNWLPGPCYRQQRVSKTSADNNNSEYSWTGATKYHLNGRDSLVNPGPAMASHKDDEEKFFPQSGVLIFGKQGSEKTNVDIEKVMITDEEEIRTTNPVATEQYGSVSTNLQRGNRQAATADVNTQGVLPGMVWQDRDVYLQGPIWAKIPHTDGHFHPSPLMGGFGLKHPPPQILIKNTPVPANPSTTFSAAKFASFITQYSTGQVSVEIEWELQKENSKRWNPEIQYTSNYNKSVNVDFTVDTNGVYSEPRPIGTRYLTRNL

SEQ ID NO: 4065 - protein, 735 aa, Artificial Sequence
  source: /note="Description of Artificial Sequence: Synthetic polypeptide"
MAADGYLPDWLEDTLSEGIRQWWKLKPGPPPPKPAERHRDDSRGLVLPGYKYLGPFNGLDKGEPVNEADAAALEHDKAYDRQLDSGDNPYLKYNHADAEFQERLKEDTSFGGNLGRAVFQAKKRVLEPLGLVEEPVKTAPGKKRPVEHSPVEPDSSSGTGKAGQQPARKRLNFGQTGDADSVPDPQPLGQPPAAPSGLGTNTMATGSGAPMADNNEGADGVGNSSGNWHCDSTWMGDRVITTSTRTWALPTYNNHLYKQISSQSGASNGNHYFGYSTPWGYFDFNRFHCHFSPRDWQRLINNNWGFRPKRLNFKLFNIQVKEVTQNDGTTTIANNLTSTVQVFTDSEYQLPYVLGSAHQGCLPPFPADVFMVPQYGYLTLNNGSQAVGRSSFYCLEYFPSQMLRTGNNFTFSYTFEDVPFHSNYAHSQSLDRLMNPLIDQYLYYLSRTNTPSGTTTQSRLQFSQAGASDIRDQSRNWLPGPCYRQQRVSKTSADNNNSEYSWTGATKYHLNGRDSLVNPGPAMASHKDDEEKFFPQSGVLIFGKQGSEKTNVDIEKVMITDEEEIRTTNPVATEQYGSVSTNLQRGNRQAATADVNTQGVLPGMVWQDRDVYLQGPIWAKIPHTDGHFHPSPLMGGFGLKHPPPQILIKNTPVPANPSTTFSAAKFASFITQYSTGQVSVEIEWELQKENSKRWNPEIQYTSNYNKSVNVDFTVDTNGVYSEPRPIGTRYLTRNL

SEQ ID NO: 4066 - protein, 735 aa, Artificial Sequence
  source: /note="Description of Artificial Sequence: Synthetic polypeptide"
MAADGYLPDWLEDTLSEGIRQWWKLKPGPPPPKPAERHKDDSRGLVLPGYKYLGPFNGLDKGEPVNEADAAALEHDKAYDRQLDSGDNPYLKYNHADAEFQERLKEDTSFGGNLGRAVFQAKKRVLEPLGLVEEPVKTAPGKKRPVEHSPVEPDSSSGTGKAGQQPARKRLNFGQTGDADSVPDPQPLGQPPAAPSGLGTNTMATGSGAPMADNNEGADGVGNSSGNWHCDSTWMGDRVITTSTRTWALPTYNNHLYKQISSQSGASNDNHYFGYSTPWGYFDFNRFHCHFSPRDWQRLINNNWGFRPKRLNFKLFNIQVKEVTQNDGTTTIANNLTSTVQVFTDSEYQLPYVLGSAHQGCLPPFPADVFMVPQYGYLTLNNGSQAVGRSSFYCLEYFPSQMLRTGNNFTFSYTFEDVPFHSSYAHSQSLDRLMNPLIDQYLYYLSRTNTPSGTTTQSRLQFSQAGASDIRDQSRNWLPGPCYRQQRVSKTSADNNNSEYSWTGATKYHLNGRDSLVNPGPAMASHKDDEEKFFPQSGVLIFGKQGSEKTNVDIEKVMITDEEEIRTTNPVATEQYGSVSTNLQRGNRQAATADVNTQGVLPGMVWQDRDVYLQGPIWAKIPHTDGHFHPSPLMGGFGLKHPPPQILIKNTPVPANPSTTFSAAKFASFITQYSAGQVSVEIEWELQKENSKRWNPEIQYTSNYNKSVNVDFTVDTNGVYSEPRPIGTRYLTRNL

SEQ ID NO: 4067 - protein, 735 aa, Artificial Sequence
  source: /note="Description of Artificial Sequence: Synthetic polypeptide"
MAADGYLPDWLEDTLSEGIRQWWKLKPGPPPPKPAERHKDDSRGLVLPGYKYLGPFNGLDKGEPVNEADAAALEHDKAYDRQLDSGDNPYLKYNHADAEFQERLKEDTSFGGNLGRAVFQAKKRVLEPLGLVEEPVKTAPGKKRPVEHSPVEPDSSSGTGKAGQQPARKRLNFGQTGDADSVPDPQPLGQPPAAPSGLGTNTMATGSGAPMADNNEGADGVGNSSGNWHCDSTWMGDRVITTSTRTWALPTYNNHLYKQISSQSGASNDNHYFGYSTPWGYFDFNRFHCHFSPRDWQRLINNNWGFRPKRLNFKLFNIQVKEVTQNDGTTTIANNLTSTVQVFTDSEYQLPYVLGSAHQGCLPPFPADVFMVPQYGYLTLNNGSQAVGRSSFYCLEYFPSQMLRTGNNFTFSYTFEDVPFHSSYAHSQSLDRLMNPLIDQYLYYLSRTNTPSGTTTQSRLQFSQAGASDIRDQSRNWLPGPCYRQQRVSKTSADNNNSEYSWTGATKYHLNGRDSLVNPGPAMASHKDDEEKFFPQSGVLIFGKQGSEKTNVDIEKVMITDEEEIRTTNPVATEQYGSVSTNLQRGNRQAATADVNTQGVLPGMVWQDRDVYLQGPIWAKIPHTDGHFHPSPLMGGFGLKHPPPQILIKNTPVPANPSTTFSAAKFASFITQYSTGQVSVEIEWELQKENSKRWNPEIQYTSNYNKSVNVDFTVDTDGVYSEPRPIGTRYLTRNL

SEQ ID NO: 4068 - protein, 735 aa, Artificial Sequence
  source: /note="Description of Artificial Sequence: Synthetic polypeptide"
MAADGYLPDWLEDTLSEGIRQWWKLKPGPPPPKPAERHKDDSRGLVLPGYKYLGPFNGLDKGEPVNEADAAALEHDKAYDRQLDSGDNPYLKYNHADAEFQERLKEDTSFGGNLGRAVFQAKKRVLEPLGLVEEPVKTAPGKKRPVEHSPVEPDSSSGTGKAGQQPARKRLNFGQTGDADSVPDPQPLGQPPAAPSGLGTNTMATGSGAPMADNNEGADGVGNSSGNWHCDSTWMGDRVITTSTRTWALPTYNNHLYKQISSQSGASNDNHYFGYSTPWGYFDFNRFHCHFSPRDWQRLINNNWGFRPKRLNFKLFNIQVKEVTQNDGTTTIANNLTSTVQVFTDSEYQLPYVLGSAHQGCLPPFPADVFMVPQYGYLTLNNGSQAVGRSSFYCLEYFPSQMLRTGNNFTFSYTFEDVPFHSSYAHSQSLDRLMNPLIDQYLYYLSRTNTPSGTTTQSRLQFSQAGASDIRDQSRNWLPGPCYRQQRVSKTSADNNNSEYSWTGATKYHLNGRDSLVNPGPAMASHKDDEEKFFPQSGVLIFGKQGSEKTNVDIEKVMITDEEEIRTTNPVATEQYGSVSTNLQRGNRQAATADVNTQGVLPGMVWQGRDVYLQGPIWAKIPHTDGHFHPSPLMGGFGLKHPPPQILIKNTPVPANPSTTFSAAKFASFITQYSTGQVSVEIEWELQKENSKRWNPEIQYTSNYNKSVNVDFTVDTNGVYSEPRPIGTRYLTRNL

SEQ ID NO: 4069 - protein, 735 aa, Artificial Sequence
  source: /note="Description of Artificial Sequence: Synthetic polypeptide"
MAADGYLPDWLEDTLSEGIRQWWKLKPGPPPPKPAERHKDDSRGLVLPGYKYLGPFNGLDKGEPVNEADAAALEHDKAYDRQLDSGDNPYLKYNHADAEFQERLKEDTSFGGNLGRAVFQAKKRVLEPLGLVEEPVKTAPGKKGPVEHSPVEPDSSSGTGKAGQQPARKRLNFGQTGDADSVPDPQPLGQPPAAPSGLGTNTMATGSGAPMADNNEGADGVGNSSGNWHCDSTWMGDRVITTSTRTWALPTYNNHLYKQISSQSGASNDNHYFGYSTPWGYFDFNRFHCHFSPRDWQRLINNNWGFRPKRLNFKLFNIQVKEVTQNDGTTTIANNLTSTVQVFTDSEYQLPYVLGSAHQGCLPPFPADVFMVPQYGYLTLNNGSQAVGRSSFYCLEYFPSQMLRTGNNFTFSYTFEDVPFHSSYAHSQSLDRLMNPLIDQYLYYLSRTNTPSGTTTQSRLQFSQAGASDIRDQSRNWLPGPCYRQQRVSKTSADNNNSEYSWTGATKYHLNGRDSLVNPGPAMAGHKDDEEKFFPQSGVLIFGKQGSEKTNVDIEKVMITDEEEIRTTNPVATEQYGSVSTNLQRGNRQAATADVNTQGVLPGMVWQDRDVYLQGPIWAKIPHTDGHFHPSPLMGGFGLKHPPPQILIKNTPVPANPSTTFSAAKFASFITQYSTGQVSVEIEWELQKENSKRWNPEIQYTSNYNKSVNVDFTVDTNGVYSEPRPIGTRYLTRNL

SEQ ID NO: 4070 - protein, 735 aa, Artificial Sequence
  source: /note="Description of Artificial Sequence: Synthetic polypeptide"
MAADGYLPDWLEDTLSEGIRQWWKLKPGPPPPKPAERHKDDSRGLVLPGYKYLGPFNGLDKGEPVNEADAAALEHDKAYDRQLDSGDNPYLKYNHADAEFQERLKEDTSFGGNLGRAVFQAKKRVLEPLGLVEEPVKTAPGKKRLVEHSPVEPDSSSGTGKAGQQPARKRLNFGQTGDADSVPDPQPLGQPPAAPSGLGTNTMATGSGAPMADNNEGADGVGNSSGNWHCDSTWMGDRVITTSTRTWALPTYNNHLYKQISSQSGASNDNHYFGYSTPWGYFDFNRFHCHFSPRDWQRLINNNWGFRPKRLNFKLFNIQVKEVTQNDGTTTIANNLTSTVQVFTDSEYQLPYVLGSAHQGCLPPFPADVFMVPQYGYLTLNNGSQAVGRSSFYCLEYFPSQMLRTGNNFTFSYTFEDVPFHSSYAHSQSLDRLMNPLIDQYLYYLSRTNTPSGTTTQSRLQFSQAGASDIRDQSRNWLPGPCYRQQRVSKTSADNNNSEYSWTGATKYHLNGRDSLVNPGPAMASHKDDEEKFFPQSGVLIFGKQGSEKTNVDIEKVMITDEEEIRTTNPVATEQYGSVSTNLQRGNRQAATADVNTQGVLPGMVWQDRDVYLQGPIWAKIPHTDGHFHPSPLMGGFGLKHPPPQILIKNTPVPANPSTTFSAAKFASFITQYSTGQVSVEIEWELQKENSKRWNPEIQYTSNYNKSVNVDFTVDTNGVYSEPRPIGTRYLTRNL

SEQ ID NO: 4071 - protein, 735 aa, Artificial Sequence
  source: /note="Description of Artificial Sequence: Synthetic polypeptide"
MAADGYLPDWLEDTLSEGIRQWWKLKPGPPPPKPAERHKDDSRGLVLPGYKYLGPFNGLDKGEPVNEAGAAALKHDKAYDRQLDSGDNPYLKYNHADAEFQERLKEDTSFGGNLGRAVFQAKKRVLEPLGLVEEPVKTAPGKKRPVEHSPVEPDSSSGTGKAGQQPARKRLNFGQTGDADSVPDPQPLGQPPAAPSGLGTNTMATGSGAPMADNNEGADGVGNSSGNWHCDSTWMGDRVITTSTRTWALPTYNNHLYKQISSQSGASNDNHYFGYSTPWGYFDFNRFHCHFSPRDWQRLINNNWGFRPKRLNFKLFNIQVKEVTQNDGTTTIANNLTSTVQVFTDSEYQLPYVLGSAHQGCLPPFPADVFMVPQYGYLTLNNGSQAVGRSSFYCLEYFPSQMLRTGNNFTFSYTFEDVPFHSSYAHSQSLDRLMNPLIDQYLYYLSRTNTPSGTTTQSRLQFSQAGASDIRDQSRNWLPGPCYRQQRVSKTSADNNNSEYSWTGATKYHLNGRDSLVNPGPAMASHKDDEEKFFPQSGVLIFGKQGSEKTNVDIEKVMITDEEEIRTTNPVATEQYGSVSTNLQRGNRQAATADVNTQGVLPGMVWQDRDVYLQGPIWAKIPHTDGHFHPSPLMGGFGLKHPPPQILIKNTPVPANPSTTFSAAKFASFITQYSTGQVSVEIEWELQKENSKRWNPEIQYTSNYNKSVNVDFTVDTNGVYSEPRPIGTRYLTRNL

SEQ ID NO: 4072 - protein, 735 aa, Artificial Sequence
  source: /note="Description of Artificial Sequence: Synthetic polypeptide"
MAADGYLPDWLEDTLSEGIRQWWKLKPGPPPPKPAERHKDDSRGLVLPGYKYLGPFNGLDKGEPVNEADAAALEHDKAYDRQLDSGDNPYLKYNHADAEFQERLKEDTSFGGNLGRAVFQAKKRVLEPLGLVEEPVKTAPGKKRPVEHSPVEPDSSSGTGKAGQQPARKRLNFGQTGDADSVPDPQPLGQPPAAPSGLGTNTMATGSGAPMADNNEGADGVGNSSGNWHCDSTWMGDRVITTSTRTWALPTYNNHLYKQISSQSGASNDNHYFGYSTPWGYFDFNRFHCHFSPRDWQRLINNNWGFRPKRLNFKLFNIQVKEVTQNDGTTTIANNLTSTVQVFTDSEYQLPYVLGSAHQGCLPPFPADVFMVPQYGYLTLNNGSQAVGRSSFYCLEYFPSQMLRTGNNFTFSYTFEDVPFHSSYAHSQSLDRLMNPLIDQYLYYLSRTNTPSGTTTQSRLQFSQAGASGIRDQSRNWLPGPCYRQQRVSKTSADNNNSEYSWTGATKYHLNGRDSLVNPGPAMASHKDDEEKFFPQSGVLIFGKQGSEKTNVDIEKVMITDEEEIRTTNPVATEQYGSVSTNLQRGNRQAATADVNTQGVLPGMVWQDRDVYLQGPIWAKIPHTDGHFHPSPLMGGFGLKHPPPQILIKNTPVPANPSTTFSAAKFASFITQYSTGQVSVEIEWELQKENSKRWNPEIQYTSNYNKSVNVDFTVDTNGVYSEPRPIGTRYLTRNL

SEQ ID NO: 4073 - protein, 735 aa, Artificial Sequence
  source: /note="Description of Artificial Sequence: Synthetic polypeptide"
MAADGYLPDWLEDTLSEGIRQWWKLKPGPPPPKPAERHKDDSRGLVLPGYKYLGPFNGLDKGEPVNEADAAALEHDKAYDRQLDSGDNPYLKYNHADAEFQERLKEDTSFGGNLGRAVFQAKKRVLEPLGLVEEPVKTAPGKKRPVEHSPVEPDSSSGTGKAGQQPARKRLNFGQTGDADSVPDPQPLGQPPAAPSGLGTNTMATGSGAPMADNNEGADGVGNSSGNWHCDSTWMGDRVITTSTRTWALPTYNNHLYKQISSQSGASNDNHYFGYSTPWGYFDFNRFHCHFSPRDWQRLINNNWGFRPKRLNFKLFNIQVKEVTQNDGTTTIANNLTSTVQVFTDSEYQLPYVLGSAHQGCLPPFPADVFMVPQYGYLTLNNGSQAVGRSSFYCLEYFPSQMLRTGNNFTFSYTFEDVPFHSSYAHSQSLDRLMNPLIDQYLYYLSRANTPSGTTTQSRLQFSQAGASDIRDQSRNWLPGPCYRQQRVSKTSADNNNSEYSWTGATKYHLNGRDSLVNPGPAMASHKDDEEKFFPQSGVLIFGKQGSEKTNVDIEKVMITDEEEIRTTNPVATEQYGSVSTNLQRGNRQAATADVNTQGVLPGMVWQDRDVYLQGPIWAKIPHTDGHFHPSPLMGGFGLKHPPPQILIKNTPVPANPSTTFSAAKFASFITQYSTGQVSVEIEWELQKENSKRWNPEIQYTSNYNKSVNVDFTVDTNGVYSEPRPIGTRYLTRNL

SEQ ID NO: 4074 - protein, 735 aa, Artificial Sequence
  source: /note="Description of Artificial Sequence: Synthetic polypeptide"
MAADGYLPDWLEDTLSEGIRQWWKLKPGPPPPKPAERHKDDSRGLVLPGYKYLGPFNGLDKGEPVNEADAAALEHDKAYDRQLDSGDNPYLKYNHADAEFQERLKEDTSFGGNLGRAVFQAKKRVLEPLGLVEEPVKTAPGKKRPVEHSPVEPDSSSGTGKAGQQPARKRLNFGQTGDADSVPDPQPLGQPPAAPSGLGTNTMATGSGAPMADNNEGADGVGNSSGNWHCDSTWMGDRVITTSTRTRALPTYNNHLYKQISSQSGASNDNHYFGYSTPWGYFDFNRFHCHFSPRDWQRLINNNWGFRPKRLNFKLFNIQVKEVTQNDGTTTIANNLTSTVQVFTDSEYQLPYVLGSAHQGCLPPFPADVFMVPQYGYLTLNNGSQAVGRSSFYCLEYFPSQMLRTGNNFTFSYTFEDVPFHSSYAHSQSLDRLMNPLIDQYLYYLSRTNTPSGTTTQSRLQFSQAGASDIRDQSRNWLPGPCYRQQRVSKTSADNNNSEYSWTGATKYHLNGRDSLVNPGPAMASHKDDEEKFFPQSGVLIFGKQGSEKTNVDIEKVMITDEEEIRTTNPVATEQYGSVSTNLQRGNRQAATADVNTQGVLPGMVWQDRDVYLQGPIWAKIPHTDGHFHPSPLMGGFGLKHPPPQILIKNTPVPANPSTTFSAAKFASFITQYSTGQVSVEIEWELQKENSKRWNPEIQYTSNYNKSVNVDFTVDTNGVYSEPRPIGTRYLTRNL

SEQ ID NO: 4075 - protein, 735 aa, Artificial Sequence
  source: /note="Description of Artificial Sequence: Synthetic polypeptide"
MAADGYLPDWLEDTLSEGIRQWWKLKPGPPPPKPAERHKDDSRGLVLPGYKYLGPFNGLDKGEPVNEADAAALEHDKAYDRQLDSGDNPYLKYNHADAEFQERLKEDTSFGGNLGRAVFQAKKRVLEPLGLVEEPVKTAPGKKRPVEHSPVEPDSSSGTGKAGQQPARKRLNFGQTGDADSVPDPQPLGQPPAAPSGLGTNTMATGSGAPMADNNEGADGVGNSSGNWHCDSTWMGDRVITTSTRTWALPTYNSHLYKQISSQSGASNDNHYFGYSTPWGYFDFNRFHCHFSPRDWQRLINNNWGFRPKRLNFKLFNIQVKEVTQNDGTTTIANNLTSTVQVFTDSEYQLPYVLGSAHQGCLPPFPADVFMVPQYGYLTLNNGSQAVGRSSFYCLEYFPSQMLRTGNNFTFSYTFEDVPFHSSYAHSQSLDRLMNPLIDQYLYYLSRTNTPSGTTTQSRLQFSQAGASDIRDQSRNWLPGPCYRQQRVSKTSADNNNSEYSWTGATKYHLNGRDSLVNPGPAMASHKDDEEKFFPQSGVLIFGKQGSEKTNVDIEKVMITDEEEIRTTNPVATEQYGSVSTNLQRGNRQAATADVNTQGVLPGMVWQDRDVYLQGPIWAKIPHTDGHFHPSPLMGGFGLKHPPPQILIKNTPVPANPSTTFSAAKFASFITQYSTGQVSVEIEWELQKENSKRWNPEIQYTSNYNKSVNVDFTVDTNGVYSEPRPIGTRYLTRNL

SEQ ID NO: 4076 - protein, 735 aa, Artificial Sequence
  source: /note="Description of Artificial Sequence: Synthetic polypeptide"
MAADGYLPDWLEDTLSEGIRQWWKLKPGPPPPKPAERHKDDSRGLVLPGYKYLGPFNGLDKGEPVNEADAAALEHDKAYDRQLDSGDNPYLKYNHADAEFQERLKEDTSFGGNLGRAVFQAKKRVLEPLGLVEEPVKTAPGKKRPVEHSPVEPDSSSGTGKAGQQPARKRLNFGQTGDADSVPDPQPLGQPPAAPSGLGTNTMATGSGAPMADNNEGADGVGNSSGNWHCDSTWMGDRVITTSTRTWALPTYNNHLYKQISSQSGASNDNHYFGYSTPWGYFDFNRFHCHFSPRDWQRLINNNWGFRPKRLNFKLFNIQVKEVTQNDGTTTIANNLTSTVQVFTDSEYQLPYVLGSAHQGCLPPFPADVFMVPQYGYLTLNNGSQAVGRSSFYCLEYFPSQMLRTGNNFTFSYTFEDVPFHSSYAHSQSLDRLMNPLIDQYLYYLSRTNTPSGTTTQSRLQFSQAGASDIRDQSRNWLPGPCYRQQRVSKTSADNNNSEYSWTGATKYHLNGRDSLVNPGPAMASHKDDEEKFFPQSGVLIFGKQGSEKTNVDIEKVMITDEEEIRTTNPVATEQYGSVSTNLQRGNRQAATADVNTQGVLPGMVWQDRDVYLQGPIWAKIPHTDGHFHPSPLMGGFGLKRPPPQILIKNTPVPANPSTTFSAAKFASFITQYSTGQVSVEIEWELQKENSKRWNPEIQYTSNYNKSVNVDFTVDTNGVYSEPRPIGTRYLTRNL

SEQ ID NO: 4077 - protein, 735 aa, Artificial Sequence
  source: /note="Description of Artificial Sequence: Synthetic polypeptide"
MAADGYLPDWLEDTLSEGIRQWWKLKPGPPPPKPAERHKDDSRGLVLPGYKYLGPFNGLDKGEPVNEADAAALEHDKAYDRQLDSGDNPYLKYNHADAEFQERLKEDTSFGGNLGRAVFQAKKRVLEPLGLVEEPVKTAPGKKRPVEHSPVEPDSSSGTGKAGQQPARKRLNFGQTGDADSVPDPQPLGQPPAAPSGLGTNTMATGSGAPMADNNEGADGVGNSSGNWHCDSTWMGDRVITTSTRTWALPTYNNHLYKQISSQSGASNDNHYFGYSTPWGYFDFNRFHCHFSPRDWQRLINNNWGFRPKRLNFKLFNIQVKEVTQNDGTTTIANNLTSTVQVFTDSEYRLPYVLGSAHQGCLPPFPADVFMVPQYGYLTLNNGSQAVGRSSFYCLEYFPSQMLRTGNNFTFSYTFEDVPFHSSYAHSQSLDRLMNPLIDQYLYYLSRTNTPSGTTTQSRLQFSQAGASDIRDQSRNWLPGPCYRQQRVSKTSADNNNSEYSWTGATKYHLNGRDSLVNPGPAMASHKDDEEKFFPQSGVLIFGKQGSEKTNVDIEKVMITDEEEIRTTNPVATEQYGSVSTNLQRGNRQAATADVNTQGVLPGMVWQDRDVYLQGPIWAKIPHTDGHFHPSPLMGGFGLKHPPPQILIKNTPVPANPSTTFSAAKFASFITQYSTGQVSVEIEWELQKENSKRWNPEIQYTSNYNKSVNVDFTVDTNGVYSEPRPIGTRYLTRNL

SEQ ID NO: 4078 - protein, 735 aa, Artificial Sequence
  source: /note="Description of Artificial Sequence: Synthetic polypeptide"
MAADGYLPDWLEDTLSEGIRQWWKLKPGPPPPKPAERHKDDSRGLVLPGYKYLGPFNGLDKGEPVNEADAAALEHDKAYDRQLDSGDNPYLKYNHADAEFQERLKEDTSFGGNLGRAVFQAKKRVLEPLGLVEEPVKTAPGKKRPVEHSPVEPDSSSGTGKAGQQPARKRLNFGQTGDADSVPDPQPLGQPPAAPSGLGTNTMATGSGAPMADNNEGADGVGNSSGNWHCDSTWMGDRVITTSTRTWALPTYNNHLYKQISSQSGASNDNHYFGYSTPWGYFDFNRFHCHFSPRDWQRLINNNWGFRPKRLNFKLFNIQVKEVTQNDGTTTIANNLTSTVRVFTDSEYQLPYVLGSAHQGCLPPFPADVFMVPQYGYLTLNNGSQAVGRSSFYCLEYFPSQMLRTGNNFTFSYTFEDVPFHSSYAHSQSLDRLMNPLIDQYLYYLSRTNTPSGTTTQSRLQFSQAGASDIRDQSRNWLPGPCYRQQRVSKTSADNNNSEYSWTGATKYHLNGRDSLVNPGPAMASHKDDEEKFFPQSGVLIFGKQGSEKTNVDIEKVMITDEEEIRTTNPVATEQYGSVSTNLQRGNRQAATADVNTQGVLPGMVWQDRDVYLQGPIWAKIPHTDGHFHPSPLMGGFGLKHPPPQILIKNTPVPANPSTTFSAAKFASFITQYSTGQVSVEIEWELQKENSKRWNPEIQYTSNYNKSVNVDFTVDTNGVYSEPRPIGTRYLTRNL

SEQ ID NO: 4079 - protein, 735 aa, Artificial Sequence
  source: /note="Description of Artificial Sequence: Synthetic polypeptide"
MAADGYLPDWLEDTLSEGIRQWWKLKPGPPPPKPAERHRDDSRGLVLPGYKYLGPFNGLDKGEPVNEADAAALEHDKAYDRQLDSGDNPYLKYNHADAEFQERLKEDTSFGGNLGRAVFQAKKRVLEPLGLVEEPVKTAPGKKRPVEHSPVEPDSSSGTGKAGQQPARKRLNFGQTGDADSVPDPQPLGQPPAALSGLGTNTMATGSGAPMADNNEGADGVGNSSGNWHCDSTWMGDRVITTSTRTWALPTYNNHLYKQISSQSGASNGNHYFGYSTPWGYFDFNRFHCHFSPRDWQRLINNNWGFRPKRLNFKLFNIQVKEVTQNDGTTTIANNLTSTVQVFTDSEYQLPYVLGSAHQGCLPPFPADVFMVPQYGYLTLNNGSQAVGRSSFYCLEYFPSQMLRTGNNFTFSYTFEDVPFHSSYAHSQSLDRLMNPLIDQYLYYLSRTNTPSGTTTQSRLQFSQAGASDIRDQSRNWLPGPCYRQQRVSKTSADNNNSEYSWTGATKYHLNGRDSLVNPGPAMASHKDDEEKFFPQSGVLIFGKQGSEKTNVDIEKVMITDEEEIRTTNPVATEQYGSVSTNLQRGNRQAATADVNTQGVLPGMVWQDRDVYLQGPIWAKIPHTDGHFHPSPLMGGFGLKHPPPQILIKNTPVPANPSTTFSAAKFASFITQYSTGQVSVEIEWELQKENSKRWNPEIQYTSNYNKSVNVDFTVDTNGVYSEPRPIGTRYLTRNL

SEQ ID NO: 4080 - protein, 735 aa, Artificial Sequence
  source: /note="Description of Artificial Sequence: Synthetic polypeptide"
MAADGYLPDWLEDTLSEGIRQWWKLKPGPPPPKPAERHRDDSRGLVLPGYKYLGPFNGLDKGEPVNEADAAALEHDKAYDRQLDSGDNPYLKYNHADAEFQERLKEDTSFGGNLGRAVFQAKKRVLEPLGLVGEPVKTAPGKKRPVEHSPVEPDSSSGTGKAGQQPARKRLNFGQTGDADSVPDPQPLGQPPAAPSGLGTNTMATGSGAPMADNNEGADGVGNSSGNWHCDSTWMGDRVITTSTRTWALPTYNNHLYKQISSQSGASNGNHYFGYSTPWGYFDFNRFHCHFSPRDWQRLINNNWGFRPKRLNFKLFNIQVKEVTQNDGTTTIANNLTSTVQVFTDSEYQLPYVLGSAHQGCLPPFPADVFMVPQYGYLTLNNGSQAVGRSSFYCLEYFPSQMLRTGNNFTFSYTFEDVPFHSSYAHSQSLDRLMNPLIDQYLYYLSRTNTPSGTTTQSRLQFSQAGASDIRDQSRNWLPGPCYRQQRVSKTSADNNNSEYSWTGATKYHLNGRDSLVNPGPAMASHKDDEEKFFPQSGVLIFGKQGSEKTNVDIEKVMITDEEEIRTTNPVATEQYGSVSTNLQRGNRQAATADVNTQGVLPGMVWQDRDVYLQGPIWAKIPHTDGHFHPSPLMGGFGLKHPPPQILIKNTPVPANPSTTFSAAKFASFITQYSTGQVSVEIEWELQKENSKRWNPEIQYTSNYNKSVNVDFTVDTNGVYSEPRPIGTRYLTRNL

SEQ ID NO: 4081 - protein, 735 aa, Artificial Sequence
  source: /note="Description of Artificial Sequence: Synthetic polypeptide"
MAADGYLPDWLEDTLSEGIRQWWKLKPGPPPPKPAERHRDDSRGLVLPGYKYLGPFNGLDKGEPVNEADAAALEHDKAYDRQLDSGDNPYLKYNHADAEFQERLKEDTSFGGNLGRAVFQAKKRVLEPLGLVEEPVKTAPGKKRPVEHSPVEPDSSSGTGKAGQQPARKRLNFGQTGDADSVPDPQPLGQPPAAPSGLGTNTMATGSGAPMADNNEGADGVGNSSGNWHYDSAWMGDRVITTSTRTWALPTYNNHLYKQISSQSGASNGNHYFGYSTPWGYFDFNRFHCHFSPRDWQRLINNNWGFRPKRLNFKLFNIQVKEVTQNDGTTTIANNLTSTVQVFTDSEYQLPYVLGSAHQGCLPPFPADVFMVPQYGYLTLNNGSQAVGRSSFYCLEYFPSQMLRTGNNFTFSYTFEDVPFHSSYAHSQSLDRLMNPLIDQYLYYLSRTNTPSGTTTQSRLQFSQAGASDIRDQSRNWLPGPCYRQQRVSKTSADNNNSEYSWTGATKYHLNGRDSLVNPGPAMASHKDDEEKFFPQSGVLIFGKQGSEKTNVDIEKVMITDEEEIRTTNPVATEQYGSVSTNLQRGNRQAATADVNTQGVLPGMVWQDRDVYLQGPIWAKIPHTDGHFHPSPLMGGFGLKHPPPQILIKNTPVPANPSTTFSAAKFASFITQYSTGQVSVEIEWELQKENSKRWNPEIQYTSNYNKSVNVDFTVDTNGVYSEPRPIGTRYLTRNL

SEQ ID NO: 4082 - protein, 735 aa, Artificial Sequence
  source: /note="Description of Artificial Sequence: Synthetic polypeptide"
MAADGYLPDWLEDTLSEGIRQWWKLKPGPPPPKPAERHRDDSRGLVLPGYKYLGPFNGLDKGEPVNEADAAALEHDKAYDRQLDSGDNPYLKYNHADAEFQERLKEDTSFGGNLGRAVFQAKKRVLEPLGLVEEPVKTAPGKKRPVEHSPVEPDSSSGTGKAGQQPARKRLNFGQTGDADSVPDPQPLGQPPAAPSGLGTNTMATGSGAPMADNNEGADGVGNSSGNWHCDSTWMGDRVITTSTRTWALPTYNNHLYKQISSQSGASNGNHYFGYSTPWGYFDFNRFHCHFSPRDWQRLINNNWGFRPKRLNFKLFNIQVKEVTQNDGTTTIANNLTSTVQVFTDSEYQLPYVLGSAHQGCLPPFPADVFMVPQYGYLTLNNGSQAVGRSSFYCLEYFPSQMLRTGNNFTFSYTFEDVPFHSSYAHSQSLDRLMNPLIDQYLYYLSRTNTPSGTTTQSRLQFSQAGASDIRDQSRNWLPGPCYRQQRVSKTSADNNNSEYSWTGATKYHLNGRDSLVNPGPAMASHKDDEEKFFPQSGVLIFGKQGSEKTNVDIEKVMITDEEEIRTTNPVATEQYGSVSTNLQRGNRQAATADVNTQGVLPGMVWQDRDVYLQGPIWAKIPHTDGHFHPSPLMGGFGLKHPPPQILIKNTPVPANPSTTFSAAKFASFIAQYSTGQVSVEIEWELQKENSKRWNPEIQYTSNYNKSVNVDFTVDTNGVYSEPRPIGTRYLTRNL

SEQ ID NO: 4083 - protein, 735 aa, Artificial Sequence
  source: /note="Description of Artificial Sequence: Synthetic polypeptide"
MAADGYLPDWLEDTLSEGIRQWWKLKPGPPPPKPAERHRDDSRGLVLPGYKYLGPFNGLDKGEPVNEADAAALEHDKAYDRQLDSGDNPYLKYNHADAEFQERLKEDTSFGGNLGRAVFQAKKRVLEPLGLVEEPVKTAPGKKRPVEHSPVEPDSSSGTGKAGQQPARKRLNFGQTGDADSVPDPQPLGQPPAAPSGLGTNTMATGSGAPMADNNEGADGVGNSSGNWHCDSTWMGDRVITTSTRTWALPTYNNHLYKQISSQSGASNGNHYFGYSTPWGYFDFNRFHCHFSPRDWQRLINNNWGFRPKRLNFKLFNIQVKEVTQNDGTTTIANNLTSTVQVFTDSEYQLPYVLGSAHQGCLPPFPADVFMVPQYGYLTLNNGSQAVGRSSFYCLEYFPSQMLRTGNNFTFSYTFEDVPFHSSYAHSQSLDRLMNPLIDQYPYYLSRTNTPSGTTTQSRLQFSQAGASDIRDQSRNWLPGPCYRQQRVSKTSADNNNSEYSWTGATKYHLNGRDSLVNPGPAMASHKDDEEKFFPQSGVLIFGKQGSEKTNVDIEKVMITDEEEIRTTNPVATEQYGSVSTNLQRGNRQAATADVNTQGVLPGMVWQDRDVYLQGPIWAKIPHTDGHFHPSPLMGGFGLKHPPPQILIKNTPVPANPSTTFSAAKFASFITQYSTGQVSVEIEWELQKENSKRWNPEIQYTSNYNKSVNVDFTVDTNGVYSEPRPIGTRYLTRNL

SEQ ID NO: 4084 - protein, 735 aa, Artificial Sequence
  source: /note="Description of Artificial Sequence: Synthetic polypeptide"
MAADGYLPDWLEDTLSEGIRQWWKLKPGPPPPKPAERHRDDSRGLVLPGYKYLGPFNGLDKGEPVNEADAAALEHDKAYDRQLDSGDNPYLKYNHADAEFQERLKEDTSFGGNLGRAVFQAKKRVLEPLGLVEEPVKTAPGKKRPVEHSPVEPDSSSGTGKAGQQPARKRLNFGQTGDADSVPDPQPLGQPPAAPSGLGTNTMATGSGAPMADNNEGADGVGNSSGNWHCDSTWMGDRVITTSTRTWALPTYNNHLYKQISSQSGASNGNHYFGYSTPWGYFDFNRFHCHFSPRDRQRLINNNWGFRPKRLNFKLFNIQVKEVTQNDGTTTIANNLTSTVQVFTDSEYQLPYVLGSAHQGCLPPFPADVFMVPQYGYLTLNNGSQAVGRSSFYCLEYFPSQMLRTGNNFTFSYTFEDVPFHSSYAHSQSLDRLMNPLIDQYLYYLSRTNTPSGTTTQSRLQFSQAGASDIRDQSRNWLPGPCYRQQRVSKTSADNNNSEYSWTGATKYHLNGRDSLVNPGPAMASHKDDEEKFFPQSGVLIFGKQGSEKTNVDIEKVMITDEEEIRTTNPVATEQYGSVSTNLQRGNRQAATADVNTQGVLPGMVWQDRDVYLQGPIWAKIPHTDGHFHPSPLMGGFGLKHPPPQILIKNTPVPANPSTTFSAAKFASFITQYSTGQVSVEIEWELQKENSKRWNPEIQYTSNYNKSVNVDFTVDTNGVYSEPRPIGTRYLTRNL

SEQ ID NO: 4085 - protein, 735 aa, Artificial Sequence
  source: /note="Description of Artificial Sequence: Synthetic polypeptide"
MAADGYLPDWLEDTLSEGIRQWWKLKPGPPPPKPAERHRDDSRGLVLPGYKYLGPFNGLDKGEPVNEADAAALEHDKAYDRQLDSGDNPYLKYNHADAEFQERLKEDTSFGGNLGRAVFQAKKRVLEPLGLVEEPVKTAPGKKRPVEHSPVEPDSSSGTGKAGQQPARKRLNFGQTGDADSVPDPQPLGQPPAAPSGLGTNTMATGSGAPMADNNEGADGVGNSSGNWHCDSTWMGDRVITTSTRTWALPTYNNHLYKQISSQSGASNGNHYFGYSTPWGYFDFNRFHCHFSPRDWQRLINNNWGFRPKRLNFKLFNIQVKEVTQNDGTTTIANNLTSTVQVFTDSEYQLPYVLGSAHQGCLPPFPADVFMVPQYGYLTLNNGSQAVGRSSFYCLEYFPSQMLRTGNNFTFSYTFEDVPFHSSYAHSQSLDRLMNPLIDQYLYYLSRTNTPSGTTTQSRLQFSQAGASDIRDQSRNWLPGPCYRQQRVSKTSADNNNSEYSWTGATKYHLNGRDSLVNPGPAMASHKDDEEKFFPQSGVLIFGKQGSEKTNVDIEKVMITDEEEIRTTNPVATEQYGSVSTNLQRGNRQAATADVNTQGVLPGMVWQDRDVYLQGPIWAKIPHTDGHFHPSPLMGGFGLKHPPPQILIKNTPVPANPSTTFSAAKFASFITQYSTGQVSVEIEWELQKENSKRWNPEIQYTSNYNKSVNVDLTVDTNGVYSEPRPIGTRYLTRNL

SEQ ID NO: 4086 - protein, 735 aa, Artificial Sequence
  source: /note="Description of Artificial Sequence: Synthetic polypeptide"
MAADGYLPDWLEDTLSEGIRQWWKLKPGPPPPKPAERHRDDSRGLALPGYKYLGPFNGLDKGEPVNEADAAALEHDKAYDRQLDSGDNPYLKYNHADAEFQERLKEDTSFGGNLGRAVFQAKKRVLEPLGLVEEPVKTAPGKKRPVEHSPVEPDSSSGTGKAGQQPARKRLNFGQTGDADSVPDPQPLGQPPAAPSGLGTNTMATGSGAPMADNNEGADGVGNSSGNWHCDSTWMGDRVITTSTRTWALPTYNNHLYKQISSQSGASNGNHYFGYSTPWGYFDFNRFHCHFSPRDWQRLINNNWGFRPKRLNFKLFNIQVKEVTQNDGTTTIANNLTSTVQVFTDSEYQLPYVLGSAHQGCLPPFPADVFMVPQYGYLTLNNGSQAVGRSSFYCLEYFPSQMLRTGNNFTFSYTFEDVPFHSSYAHSQSLDRLMNPLIDQYLYYLSRTNTPSGTTTQSRLQFSQAGASDIRDQSRNWLPGPCYRQQRVSKTSADNNNSEYSWTGATKYHLNGRDSLVNPGPAMASHKDDEEKFFPQSGVLIFGKQGSEKTNVDIEKVMITDEEEIRTTNPVATEQYGSVSTNLQRGNRQAATADVNTQGVLPGMVWQDRDVYLQGPIWAKIPHTDGHFHPSPLMGGFGLKHPPPQILIKNTPVPANPSTTFSAAKFASFITQYSTGQVSVEIEWELQKENSKRWNPEIQYTSNYNKSVNVDFTVDTNGVYSEPRPIGTRYLTRNL

SEQ ID NO: 4087 - protein, 735 aa, Artificial Sequence
  source: /note="Description of Artificial Sequence: Synthetic polypeptide"
MAADGYLPDWLEDTLSEGIRQWWKLKPGPPPPKPAERHRDDSRGLVLPGYKYLGPFNGLDKGEPVNEADAAALEHDKAYDRQLDSGDNPYLKYNHADAEFQERLKEDTSFGGNLGRAVFQAKKRVLEPLGLVEEPVKTAPGKKRPVEHSPVEPDSSSGTGKAGQQPARKRLNFGQTGDADSVPDPQPLGQPPAAPSGLGTNTMATGSGAPMADNNEGADGVGNSSGNWHCDSTWMGDRVITTSTRTWALPTYNNHLYKQISSQSGASNGNHYFGYSTPWGYFDFNRFHCHFSPRDWQRLINNNWGFRPKRLNFKLFNIQVKEVTQNDGTTTIANNLTSTVQVFTDSEYQLPYVLGSAHQGCLPPFPADVFMVPQYGYLTLNNGSQAVGRSSFYCLEYFPSQMLRTGNNFTFSYTFEDVPFHSSYAHSQSLDRLMNPLIDQYLYYLSRTNTPSGTTTQSRLQFSQAGASDIRDQSRNWLPGPCYRQQRVSKTSADNNNSEYSWTGATKYHLNGRDSLVNPGPAMASHKDDEEKFFPQSGVLIFGKQGSEKTNVDIEKVMITDEEEIRTTNPVATEQYGSVSTNLQRGNRQAATADANTQGVLPGMVWQDRDVYLQGPIWAKIPHTDGHFHPSPLMGGFGLKHPPPQILIKNTPVPANPSTTFSAAKFASFITQYSTGQVSVEIEWELQKENSKRWNPEIQYTSNYNKSVNVDFTVDTNGVYSEPRPIGTRYLTRNL

SEQ ID NO: 4088 - protein, 735 aa, Artificial Sequence
  source: /note="Description of Artificial Sequence: Synthetic polypeptide"
MAADGYLPDWLEDTLSEGIRQWWKLKPGPPPPKPAERHRDDSRGLVLPGYKYLGPFNGLDKGEPVNEADAAALEHDKAYDRQLDSGDNPYLKYNHADAEFQERLKEDTSFGGNLGRAVFQAKKRVLEPLGLVEEPVKTAPGKKRPVEHSPVEPDSSSGTGKAGQQPARKRLNFGQTGDADSVPDPQPLGQPPAAPSGLGTNTMATGSGAPMADNNEGADGVGNSSGNWHCDSTWMGDRVITTSTRTWALPTYNNHLYKQISSQSGASNGNHYFGYSTPWGYFDFNRFHCHFSPRDWQRLINNNWGFRPKRLNFKLFNIQVKEVTQNDGTTTIANNLTSTVQVFTDSEYQLPYVLGSAHQGCLPPFPADVFMVPQYGYLTLNNGSQAVGRSSFYCLEYFPSQMLRTGNNFTFSYTFEDVPFHSSYAHSQSLDRLMNPLIDQYLYYLSRTNTPSGTTTQSRLQFSQAGASDIRDQSRNWLPGPCYRQQRVSKTSADNNNSEYSWTGATKYHLNGRDSLVNPGPAMASHKDDEEKFFPQSGVLIFGKQGSEKTNVDIEKVMITDEGEIRTTNPVATEQYGSVSTNLQRGNRQAATADVNTQGVLPGMVWQDRDVYLQGPIWAKIPHTDGHFHPSPLMGGFGLKHPPPQILIKNTPVPANPSTTFSAAKFASFITQYSTGQVSVEIEWELQKENSKRWNPEIQYTSNYNKSVNVDFTVDTNGVYSEPRPIGTRYLTRNL

SEQ ID NO: 4089 - protein, 735 aa, Artificial Sequence
  source: /note="Description of Artificial Sequence: Synthetic polypeptide"
MAADGYLPDWLEDTLSEGIRQWWKLKPGPPPPKPAERHRDDSRGLVLPGYKYLGPFNGLDKGEPVNEADAAALEHDKAYDRQLDSGDNPYLKYNHADAEFQERLKEDTSFGGNLGRAVFQAKKRVLEPLGLVEEPVKTAPGKKRPVEHSPVEPDSSSGTGKAGQQPARKRLNFGQTGDADSVPDPQPLGQPPAAPSGLGTNTMATGSGAPMADNNEGADGVGNSSGNWHCDSTWMGDRVITTSTRTWALPTYNNHLYKQISSQSGASNGNHYFGYSTPWGYFDFNRFHCHFSPRDWQRLINNNWGFRPKRLNFKLFNIQVKEVTQNDGTTTIANNLTSTVQVFTDSEYQLPYVLGSAHQGCLPPFPADVFMVPQYGYLTLNNGSQAVGRSSFYCLEYFPSQMLRTGNNFTFSYTFEDVPFHSSYAHSQSLDRLMNPLIDQYLYYLSRTNTPSGTTTQSRLQFSQAGASDIRDQSRNWLPGPCYRQQRVSKTSADNNNSEYSWTGATKYHLNGRDSLVNPGPAMASHKDDEEKFFPQSGVLIFGKQGSEKTNVDIEKVMITDEEEIRTTNPVATEQYGSVSTNLQRGNRQAATADVNTQGVLPGMVWQDRDVYLQGPIWAKIPHTDGHFHPSPPMGGFGLKHPPPQILIKNTPVPANPSTTFSAAKFASFITQYSTGQVSVEIEWELQKENSKRWNPEIQYTSNYNKSVNVDFTVDTNGVYSEPRPIGTRYLTRNL

SEQ ID NO: 4090 - protein, 735 aa, Artificial Sequence
  source: /note="Description of Artificial Sequence: Synthetic polypeptide"
MAADGYLPDWLEDTLSEGIRQWWKLKPGPPPPKPAERHRDDSRGLVLPGYKYLGPFNGLDKGEPVNEADAAALEHDKAYDRQLDSGDNPYLKYNHADAEFQERLKEDTSFGGNLGRAVFQAKKRVLEPLGLVEEPVKTAPGKKRPVEHSPVEPDSSSGTGKAGQQPARKRLNFGQTGDADSVPDPQPLGQPPAAPSGLGTNTMATGSGAPMADNNEGADGVGNSSGNWHCDSTWMGDRVITTSTRTWALPTYNNHLYKQISSQSGASNGNHYFGYSTPWGYFDFNRFHCHFSPRDWQRLINNNWGFRPKRLNFKLFNIQVKEVTQNDGTTTIANNLTSTVQVFTDSEYQLPYVLGSAHQGCLPPFPADVFMVPQYGYLTLNNGSQAVGRSSFYCLEYFPSQMLRTGNNFTFSYTFEDVPFHSSYAHSQSLDRLMNPLIDQYLYYLSRTNTPSGTTTQSRLQFSQAGASDIRDQSRNWLPGPCYRQQRVSKTSADNNNSEYSWTGATKYHLNGRDSLVNPGPAMASHKDDEEKFFPQSGVLIFGKQGSEKTNVDIEKVMITDEEEIRTTNPVATEQYGSVSTNLQRGNRQAATADVNTQGVLPGMVWQDRDVYLQGPIWAKIPHTDGHFHPSPLMGGFGLKHPPPQILIKNTPVPANPSTTFSAAKFASFITQYSTGQVSVEIEWELQKENSKRWNPEIQYTSDYNKSVNVDFTVDTNGVYSEPRPIGTRYLTRNL

SEQ ID NO: 4091 - protein, 735 aa, Artificial Sequence
  source: /note="Description of Artificial Sequence: Synthetic polypeptide"
MAADGYLPDWLEDTLSEGIRQWWKLKPGPPPPKPAERHRDDSRGLVLPGYKYLGPFNGLDKGEPVNEADAAALEHDKAYDRQLDSGDNPYLKYNHADAEFQERLKEDTSFGGNLGRAVFQAKKRVLEPLGLVEEPVKTAPGKKRPVEHSPVEPDSSSGTGKAGQQPARKRLNFGQTGDADSVPDPQPLGQPPAAPSGLGTNTMATGSGAPMADNNEGADGVGNSSGNWHCDSTWMGDRVITTSTRTWALPTYNNHLYKQISSQSGASNGNHYFGYSTPWGYFDFNRFHCHFSPRDWQRLINNNWGFRPKRLNFKLFNIQVKEVTQNGGTTTIANNLTSTVQVFTDSEYQLPYVLGSAHQGCLPPFPADVFMVPQYGYLTLNNGSQAVGRSSFYCLEYFPSQMLRTGNNFTFSYTFEDVPFHSSYAHSQSLDRLMNPLIDQYLYYLSRTNTPSGTTTQSRLQFSQAGASDIRDQSRNWLPGPCYRQQRVSKTSADNNNSEYSWTGATKYHLNGRDSLVNPGPAMASHKDDEEKFFPQSGVLIFGKQGSEKTNVDIEKVMITDEEEIRTTNPVATEQYGSVSTNLQRGNRQAATADVNTQGVLPGMVWQDRDVYLQGPIWAKIPHTDGHFHPSPLMGGFGLKHPPPQILIKNTPVPANPSTTFSAAKFASFITQYSTGQVSVEIEWELQKENSKRWNPEIQYTSNYNKSVNVDFTVDTNGVYSEPRPIGTRYLTRNL

SEQ ID NO: 4092 - protein, 735 aa, Artificial Sequence
  source: /note="Description of Artificial Sequence: Synthetic polypeptide"
MAADGYLPDWLEDTLSEGIRQWWKLKPGPPPPKPAERHRDDSRGLVLPGYKYLGPFNGLDKGEPVNEADAAALEHDKAYDRQLDSGDNPYLKYNHADAEFQERLKEDTSFGGNLGRAVFQAKKRVLEPLGLVEEPVKTAPGKKRPVEHSPVEPDSSSGTGKAGQQPARKRLNFGQTGDADSVPDPQPLGQPPAAPSGLGTNTMATGSGAPMADNNEGADGVGNSSGNWHCDSTWMGDRVITTSTRTWALPTYNNHLYKQISSQSGASNGNHYFGYSTPWGYFDFNRFHCHFSPRDWQRLINNNWGFRPKRLNFKLFNIQVKEVTQNDGTTTIANNLTSTVQVFTDSEYQLPYVLGSAHQGCLPPFPADVFMVPQYGYLTLNNGSQAVGRSSFYCLEYFPSQMLRTGNNFTFSYTFEDVPFHSSYAHSQSLDRLMNPLIDQYLYYLSRTNTPSGTTTQSRLQFSQAVASDVRDQSRNWLPGPCYRQQRVSKTSADNNNSEYSWTGATKYHLNGRDSLVNPGPAMASHKDDEEKFFPQSGVLIFGKQGSEKTNVDIEKVMITDEEEIRTTNPVATEQYGSVSTNLQRGNRQAATADVNTQGVLPGMVWQDRDVYLQGPIWAKIPHTDGHFHPSPLMGGFGLKHPPPQILIKNTPVPANPSTTFSAAKFASFITQYSTGQVSVEIEWELQKENSKRWNPEIQYTSNYNKSVNVDFTVDTNGVYSEPRPIGTRYLTRNL

SEQ ID NO: 4093 - protein, 735 aa, Artificial Sequence
  source: /note="Description of Artificial Sequence: Synthetic polypeptide"
MAADGYLPDWLEDTLSEGIRQRWKLKPGPPPPKPAERHRDDSRGLVLPGYKYLGPFNGLDKGEPVNEADAAALEHDKAYDRQLDSGDNPYLKYNHADAEFQERLKEDTSFGGNLGRAVFQAKKRVLEPLGLVEEPVKTAPGKKRPVEHSPVEPDSSSGTGKAGQQPARKRLNFGQTGDADSVPDPQPLGQPPAAPSGLGTNTMATGSGAPMADNNEGADGVGNSSGNWHCDSTWMGDRVITTSTRTWALPTYNNHLYKQISSQSGASNGNHYFGYSTPWGYFDFNRFHCHFSPRDWQRLINNNWGFRPKRLNFKLFNIQVKEVTQNDGTTTIANNLTSTVQVFTDSEYQLPYVLGSAHQGCLPPFPADVFMVPQYGYLTLNNGSQAVGRSSFYCLEYFPSQMLRTGNNFTFSYTFEDVPFHSSYAHSQSLDRLMNPLIDQYLYYLSRTNTPSGTTTQSRLQFSQAGASDIRDQSRNWLPGPCYRQQRVSKTSADNNNSEYSWTGATKYHLNGRDSLVNPGPAMASHKDDEEKFFPQSGVLIFGKQGSEKTNVDIEKVMITDEEEIRTTNPVATEQYGSVSTNLQRGNRQAATADVNTQGVLPGMVWQDRDVYLQGPIWAKIPHTDGHFHPSPLMGGFGLKHPPPQILIKNTPVPANPSTTFSAAKFASFITQYSTGQVSVEIEWELQKENSKRWNPEIQYTSNYNKSVNVDFTVDTNGVYSEPRPIGTRYLTRNL

SEQ ID NO: 4094 - protein, 735 aa, Artificial Sequence
  source: /note="Description of Artificial Sequence: Synthetic polypeptide"
MAADGYLPDWLEDTLSEGIRQWWKLKPGPPPPKPAERHKDDSRGLVLPGYKYLGPFNGLDKGEPVNEADAAALEHDKAYDRQLDSGDNPYLKYNHADAEFQERLKEDTSFGGNLGRAVFQAKKRVLEPLGLVEEPVKTAPGKKRPVEHSPVEPDSSSGTGKAGQQPARKRLNFGQTGDADSVPDPQPLGQPPAAPSGLGTNTMATGSGAPMADNNEGADGVGNSSGNWHCDSTWMGDRVITTSTRTWALPTYNNHLYKQISSQSGASNDNHYFGYSTPWGYFDFNRFHCHFSPRDWQRLINNNWGFRPKRLNFKLFNIQVKEVTQNDGTTTIANNLTSTVQVFTDSEYQLPYVLGSAHQGCLPPFPADVFMVPQYGYLTLNNGSQAVGRSSFYCLEYFPSQMLRTGNNFTFSYTFEDVPFHSSYAHSQSLDRLMNPLIDQYLYYLSRTNTPSGTTTQSRLQFSQAGASDIRDQSRNWLPGPCYRQQRVSKTSADNNNSEYSWTGATKYHLNGRDSLVNPGPAMASHKDDEEKFFPQSGVLIFGKQGSEKTNVDIEKVMTTDEEEIRTTNPVATEQYGSVSTNLQRGNRQAATADVNTQGVLPGMVWQDRDVYLQGPIWAKIPHTDGHFHPSPLMGGFGLKHPPPQILIKNTPVPANPSTTFSAAKFASFITQYSTGQVSVEIEWELQKENSKRWNPEIQYTSNYNKSVNVDFTVDTNGVYSEPRPIGTRYLTRNL

SEQ ID NO: 4095 - protein, 735 aa, Artificial Sequence
  source: /note="Description of Artificial Sequence: Synthetic polypeptide"
MAADGYLPDWLEDTLSEGIRQWWKLKPGPPPPKPAERHKDDSRGLVLPGYKYLGPFNGLDKGEPVNEADAAALEHDKAYDRQLDSGDNPYLKYNHADAEFQERLKEDTSFGGNLGRAVFQAKKRVLEPPGLVEEPVKTAPGKKRPVEHSPVEPDSSSGTGKAGQQPARKRLNFGQTGDADSVPDPQPLGQPPAAPSGLGTNTMATGSGAPMADNNEGADGVGNSSGNWHCDSTWMGDRVITTSTRTWALPTYNNHLYKQISSQSGASNDNHYFGYSTPWGYFDFNRFHCHFSPRDWQRLINNNWGFRPKRLNFKLFNIQVKEVTQNDGTTTIANNLTSTVQVFTDSEYQLPYVLGSAHQGCLPPFPADVFMVPQYGYLTLNNGSQAVGRSSFYCLEYFPSQMLRTGNNFTFSYTFEDVPFHSSYAHSQSLDRLMNPLIDQYLYYLSRTNTPSGTTTQSRLQFSQAGASDIRDQSRNWLPGPCYRQQRVSKTSADNNNSEYSWTGATKYHLNGRDSLVNPGPAMASHKDDEEKFFPQSGVLIFGKQGSEKTNVDIEKVMTTDEEEIRTTNPVATEQYGSVSTNLQRGNRQAATADVNTQGVLPGMVWQDRDVYLQGPIWAKIPHTDGHFHPSPLMGGFGLKHPPPQILIKNTPVPANPSTTFSAAKFASFITQYSTGQVSVEIEWELQKENSKRWNPEIQYTSNYNKSVNVDFTVDTNGVYSEPRPIGTRYLTRNL

SEQ ID NO: 4096 - protein, 735 aa, Artificial Sequence
  source: /note="Description of Artificial Sequence: Synthetic polypeptide"
MAADGYLPDWLEDTLSEGIRQWWKLKPGPPPPKPAERHKDDSRGLVLPGYKYLGPFNGLDKGEPVNEADAAALEHDKAYDRQLDSGDNPYLKYNHADAEFQERLKEDTSFGGNLGRAVFQAKKRVLEPLGLVEEPVKTAPGKKRPVEHSPVEPDSSSGTGKAGQQPARKRLNFGQTGDADSVPDPQPLGQPPAAPSGLGTNTMATGSGAPMADNNEGADGVGNSSGNWHCDSTWMGDRVITTSTRTWALPTYNNHLYKQISSQSGASNDNHYFGYSTPWGYFDFNRFHCHFSPRDWQRLINNNWGFRPKRLNFKLFNIQVKEVTQNDGTTTIANNLTSTVQVFTDSEYQLPYVLGSAHQGCLPPFPADVFMVPQYGYLTLNNGSQAVGRSSFYCLEYFPSQMLRTGNNFTFSYTFEDVPFHSSYAHSQSLDRLMNPLIDQYLYYLSRTNTPSGTTTQSRLQFSQAGASDIRDQSRNWLPGPCYRQQRVSKTSADNNNSEYSWTGATKYHLNGRDSLVNPGPAMASHKDDEEKFFPQSGVLIFGKQGSEKTNVDIEKVMTTDEEEIRTTNPVATEQYGSVSTNLQRGNRQAATADVNTQGVLPGMVWQDRDVYLQGPIWAKIPHTDGHFHPSPLMGGFGLKHPPPQILIKNTPVPANPSTTFSAAKFASFITQYSTGQVSVEIEWELQKENGKRWNPEIQYTSNYNKSVNVDFTVDTNGVYSEPRPIGTRYLTRNL

SEQ ID NO: 4097 - protein, 735 aa, Artificial Sequence
  source: /note="Description of Artificial Sequence: Synthetic polypeptide"
MAADGYLPDWLEDTLSEGIRQWWKLKPGPPPPEPAERHKDDSRGLVLPGYKYLGPFNGLDKGEPVNEADAAALEHDKAYDRQLDSGDNPYLKYNHADAEFQERLKEDTSFGGNLGRAVFQAKKRVLEPLGLVEEPVKTAPGKKRPVEHSPVEPDSSSGTGKAGQQPARKRLNFGQTGDADSVPDPQPLGQPPAAPTSLGSTTMATGSGAPMADNNEGADGVGNSSGNWHCDSQWLGDRVITTSTRTWALPTYNNHLYKQISSQSGASNDNHYFGHSTPWGYFDFNRFHCHFSPRDWQRLINNNWGFRPKRLNFKLFNIQVKEVTQNDGTTTIANNLTSTVQVFTDSEYQLPYVLGSAHQGCLPPFPADVFMVPQYGYLTLNNGSQAVGRSSFYCLEYFPSQMLRTGNNFTFSYTFEDVPFHSSYAHSQSLDRLMNPLIDQYLYYLNKTQSNSGTLQQSRLLFSQAGPTSMSLQAKNWLPGPCYRQQRLSKQANDNNNSNFPWTAATKYHLNGRDSLVNPGPAMASHKDDEEKFFPMHGTLIFGKQGTNANDADLDNVMITDEEEIRTTNPVATEQYGTVSNNLQNSNTGPTTGTVNHQGALPGMVWQDRDVYLQGPIWAKIPHTDGHFHPSPLMGGFGLKHPPPQIMIKNTPVPANPPTNFSSAKFASFITQYSTGQVSVEIEWELQKENSKRWNPEIQYTSNYNKSVNVDFTVDTNGVYSEPRPIGTRYLTRNL

SEQ ID NO: 4098 - protein, 735 aa, Artificial Sequence
  source: /note="Description of Artificial Sequence: Synthetic polypeptide"
MAADGYLPDWLEDTLSEGIRQWWKLKPGPPPPKPAERHKDDSRGLVLPGYKYLGPFNGLDKGEPVNEADAAALEHDKAYDRQLDSGDNPYLKYNHADAEFQERLKEDTSFGGNLGRAVFQAKKRVLEPLGLVEEPVKTAPGKKRPVEHSPVEPDSSSGTGKAGQQPARKRLNFGQTGDADSVPDPQPLGQPPAAPTSLGSTTMATGSGAPMADNNEGADGVGNSSGNWHCDSQWLGDRVITTSTRTWALPTYNNHLYKQISSQSGASNDNHYFGHSTPWGYFDFNRFHCHFSPRDWQRLINNNWGFRPKRLNFKLFNIQVKEVTQNDGTTTIANNLTSTVQVFTDSEYQLPYVLGSAHQGCLPPFPADVFMVSQYGYLTLNNGSQAVGRSSFYCLEYFPSQMLRTGNNFTFSYTFEDVPFHSSYAHSQSLDRLMNPLIDQYLYYLNKTQSNSGTLQQSRLLFSQAGPTSMSLQAKNWLPGPCYRQQRLSKQANDNNNSNFPWTAATKYHLNGRDSLVNPGPAMASHKDDEEKFFPMHGTLIFGKQGTNANDADLDNVMITDEEEIRTTNPVATEQYGTVSNNLQNSNTGPTTGTVNHQGALPGMVWQDRDVYLQGPIWAKIPHTDGHFHPSPLMGGFGLKHPPPQIMIKNTPVPANPPTNFSSAKFASFITQYSTGQVSVEIEWELQKENSKRWNPEIQYTSNYNKSVNVDFTVDTNGVYSEPRPIGTRYLTRNL

SEQ ID NO: 4099 - protein, 735 aa, Artificial Sequence
  source: /note="Description of Artificial Sequence: Synthetic polypeptide"
MAADGYLPDWLEDTLSEGIRQWWKLKPGPPPPKPAERHKDDSRGLVLPGYKYLGPFNGLDKGEPVNEADAAALEHDKAYDRQLDSGDNPYLKYNHADAEFQERLKEDTSFGGNLGRAVFQAKKRVLEPLGLVEEPVKTAPGKKRPVEHSPVEPDSSSGTGKAGQQPARKRLNFGQTGDADSVPDPQPLGQPPAAPTSLGSTTMATGSGAPMADNNEGADGVGNSSGNWHCDSQWLGDRVITTSTRTWALPTYNNHLYKQISSQSGASNDNHYFGHSTPWGYFDFNRFHCHFSPRDWQRLINNNWGFRPKRLNFKLFNIQVKEVTQNDGTTTIANNLTSTVQVFTDSEYQLPYVLGSAHQGCLPPFPADVFMVSQYGYLTLNNGSQAVGRSSFYCLEYFPSQMLRTGNNFTFSYTFEDVPFHSSYAHSQSLDRLMNPLIDQYLYYLNKTQSNSGTLQQSRLLFSQAGPTSMSLQAKNWLPGPCYRQQRLSKQANDNNNSNFPWTAATKYHLNGRDSLVNPGPAMASHKDDEEKLFPMHGTLIFGKQGTNANDADLDNVMITDEEEIRTTNPVATEQYGTVSNNLQNSNTGPTTGTVNHQGALPGMVWQDRDVYLQGPIWAKIPHTDGHFHPSPLMGGFGLKHPPPQIMIKNTPVPANPPTNFSSAKFASFITQYSTGQVSVEIEWELQKENSKRWNPEIQYTSNYNKSVNVDFTVDTNGVYSEPRPIGTRYLTRNL

SEQ ID NO: 4100 - protein, 735 aa, Artificial Sequence
  source: /note="Description of Artificial Sequence: Synthetic polypeptide"
MAADGYLPDWLEDTLSEGIRQWWKLKPGPPPPKPAERHKDDSRGLVLPGYKYLGPFNGLDKGEPVNEADAAALEHDKAYDRQLDSGDNPYLKYNHADAEFQERLKEDTSFGGNLGRAVFQAKKRVLEPLGLVEEPVKTAPGKKRPVEHSPVEPDSSSGTGKAGQQPARKRLNFGQTGDADSVPDPQPLGQPPAAPTSLGSTTMATGSGAPMADNNEGADGVGNSSGNWHCDSQWLGDRVITTSTRTWALPTYNNHLYKQISSQSGASNDNHYFGHSTPWGYFDFNRFHCHFSPRDWQRLINNNWGFRPKRLNFKLFNIQVKEVTQNDGTTTIANNLTSTVQVFTDSEYQLPYVLGSAHQGCLPPFPADVFMVPQYGYLTLNNGSQAVGRSSFYCLEYFPSQMLRTGNNFTFSYTFEDVPFHSSYAHSQSLDRLMNPLIDQYLYYLNKTQSNSGTLQQSRLLFSQAGPTSMSLQAKNWLPGPCYRQQRLSKQANDNNNSNFSWTAATKYHLNGRDSLVNPGPAMASHKDDEEKFFPMHGTLIFGKQGTNANDADLDNVMITDEEEIRTTNPVATEQYGTVSNNLQNSNTGPTTGTVNHQGALPGMVWQDRDVYLQGPIWAKIPHTDGHFHPSPLMGGFGLKHPPPQIMIKNTPVPANPPTNFSSAKFASFITQYSTGQVSVEIEWELQKENSKRWNPEIQYTSNYNKSVNVDFTVDTNGVYSEPRPIGTRYLTRNL

SEQ ID NO: 4101 - protein, 735 aa, Artificial Sequence
  source: /note="Description of Artificial Sequence: Synthetic polypeptide"
MAADGYLPDWLEDTLSEGIRQWWKLKPGPPPPKPAERHKDDSRGLVLPGYKYLGPFNGLDKGEPVNEADAAALEHDKAYDRQLDSGDNPYLKYNHADAEFQERLKEDTSFGGNLGRAVFQAKKRVLEPLGLVEEPVKTAPGKKRPVEHSPVEPDSSSGTGKAGQQPARKRLNFGQTGDADSVPDPQPLGQPPAAPTSLGSTTMATGSGAPMADNNEGADGVGNSSGNWHCDSQWLGDRVITTSTRTWALPTYNNHLYKQISSQSGASNDNHYFGHSTPWGYFDFNRFHCHFSPRDWQRLINNNWGFRPKRLNFKLFNIQVKEVTQNDGTTTIANNLTSTVQVFTDSEYQLPYVLGSAHQGCLPPFPADVFMVPQYGYLTLNNGSQAVGRSSFYCLEYFPSQMLRTGNNFTFSYTFEDVPFHSSYAHSQSLDRLMNPLIDQYLYYLNKTQSNSGTLQQSRLLFSQAGPTSMSLQAKNWLPGPCYRQQRLSKQANDNNNSNFPWTAATKYHLNGRDSLVNPGPAMASHKDDEEKFFPMHGTLIFGKQGTNANDADLDNVMITDEEEIRTTNPLATEQYGTVSNNLQNSNTGPTTGTVNHQGALPGMVWQDRDVYLQGPIWAKIPHTDGHFHPSPLMGGFGLKHPPPQIMIKNTPVPANPPTNFSSAKFASFITQYSTGQVSVEIEWELQKENSKRWNPEIQYTSNYNKSVNVDFTVDTNGVYSEPRPIGTRYLTRNL

SEQ ID NO: 4102 - protein, 735 aa, Artificial Sequence
  source: /note="Description of Artificial Sequence: Synthetic polypeptide"
MAADGYLPDWLEDTLSEGIRQWWKLKPGPPPPKPAERHKDDSRGLVLPGYKYLGPFNGLDKGEPVNEADAAALEHDKAYDRQLDSGDNPYLKYNHADAEFQERLKEDTSFGGNLGRAVFQAKKRVLEPLGLVEEPVKTAPRKKRPVEHSPVEPDSSSGTGKAGQQPARKRLNFGQTGDADSVPDPQPLGQPPAAPTSLGSTTMATGSGAPMADNNEGADGVGNSSGNWHCDSQWLGDRVITTSTRTWALPTYNNHLYKQISSQSGASNDNHYFGHSTPWGYFDFNRFHCHFSPRDWQRLINNNWGFRPKRLNFKLFNIQVKEVTQNDGTTTIANNLTSTVQVFTDSEYQLPYVLGSAHQGCLPPFPADVFMVPQYGYLTLNNGSQAVGRSSFYCLEYFPSQMLRTGNNFTFSYTFEDVPFHSSYAHSQSLDRLMNPLIDQYLYYLNKTQSNSGTLQQSRLLFSQAGPTSMSLQAKNWLPGPCYRQQRLSKQANDNNNSNFPWTAATKYHLNGRDSLVNPGPAMASHKDDEEKFFPMHGTLIFGKQGTNANDADLDNVMITDEEEIRTTNPVATEQYGTVSNNLQNSNTGPTTGTVNHQGALPGMVWQDRDVYLQGPIWAKIPHTDGHFHPSPLMGGFGLKHPPPQIMIKNTPVPANPPTNFSSAKFASFITQYSTGQVSVEIEWELQKENSKRWNPEIQYTSNYNKSVNVDFTVDTNGVYSEPRPIGTRYLTRNL

SEQ ID NO: 4103 - protein, 735 aa, Artificial Sequence
  source: /note="Description of Artificial Sequence: Synthetic polypeptide"
MAADGYLPDWLEDTLSEGIRQWWKLKPGPPPPKPAERHKDDSRGLVLPGYKYLGPFNGLDKGEPVNEADAAALEHDKAYDRQLDSGDNPYLKYNHADAEFQERLKEDTSFGGNLGRAVFQAKKRVLEPLGLVEEPVKTAPGKKRPVEHSPVEPDSSSGTGKAGQQPARKRLNFGQTGDADSVPDPQPLGQPPAAPTSLGSTTMATGSGAPMADNNEGADGVGNSSGNWHCDSQWLGDRVITTSTRTWALPTYNNHLYKQISSQSGASNDNHYFGHSTPWGYFDFNRFHCHFSPRDWQRLINNNWGFRPKRLNFKLFNIQVKEVTQNDGTTTIANNLTSTVQVFTDSEYQLPYVLGSAHQGCLPPFPADVFMVPQYGYLTLNNGSQAVGRSSFYCLEYFPSQMLRTGNNFTFSYTFEDVPFHSSYAHSQSLDRLMNPLIDQYLYYLNKTQSNSGTLQQSRLLFSQAGPTSMSLQAKNWLPGPCYRQQRLSKQANDNNNSNFPWTAATKYHLNGRDSLVNPGPAMASHKDDEEKFFPMHGTLIFGKQGTNANDADLDNVMITDEEEIRTTNPVATEQYGTVSNNLQNSNTGPTTGTVNHQGALPGMVWQDRDVYLQGPIWAKIPHTDGRFHPSPLMGGFGLKHPPPQIMIKNTPVPANPPTNFSSAKFASFITQYSTGQVSVEIEWELQKENSKRWNPEIQYTSNYNKSVNVDFTVDTNGVYSEPRPIGTRYLTRNL

SEQ ID NO: 4104 - protein, 735 aa, Artificial Sequence
  source: /note="Description of Artificial Sequence: Synthetic polypeptide"
MAADGYLPDWLEDTLSEGIRQWWKLKPGPPPPKPAERHKDDSRGLVLPGYKYLGPFNGLDKGEPVNEADAAALEHDKAYDRQLDSGDNPYLKYNHADAEFQERLKEDTSFGGNLGRAVFQAKKRVLEPLGLVEEPVKTAPGKKRPVEHSPVEPDSSSGTGKAGQQPARKRLNFGQTGDADSVPDPQPLGQPPAAPTSLGSTTMATGSGAPMADNNEGADGVGNSSGNWHCDSQWLGDRVITTSTRTWALPTYSNHLYKQISSQSGASNDNHYFGHSTPWGYFDFNRFHCHFSPRDWQRLINNNWGFRPKRLNFKLFNIQVKEVTQNDGTTTIANNLTSTVQVFTDSEYQLPYVLGSAHQGCLPPLPADVFMVPQYGYLTLNNGSQAVGRSSFYCLEYFPSQMLRTGNNFTFSYTFEDVPFHSSYAHSQSLDRLMNPLIDQYLYYLNKTQSNSGTLQQSRLLFSQAGPTSMSLQAKNWLPGPCYRQQRLSKQANDNNNSNFPWTAATKYHLNGRDSLVNPGPAMASHKDDEEKFFPMHGTLIFGKQGTNANDADLDNVMITDEEEIRTTNPVATEQYGTVSNNLQNSNTGPTTGTVNHQGALPGMVWQDRDVYLQGPIWAKIPHTDGHFHPSPLMGGFGLKHPPPQIMIKNTPVPANPPTNFSSAKFASFITQYSTGQVSVEIEWELQKENSKRWNPEIQYTSNYNKSVNVDFTVDTNGVYSEPRPIGTRYLTRNL

SEQ ID NO: 4105 - protein, 735 aa, Artificial Sequence
  source: /note="Description of Artificial Sequence: Synthetic polypeptide"
MAADGYLPDWLEDTLSEGIRQWWKLKPGPPPPKPAERHKDDSRGLVLPGYKYLGPFNGLDKGEPVNEADAAALEHDKAYDRQLDSGDNPYLKYNHADAEFQERLKEDTSFGGNLGRAVFQAKKRVLEPLGLVEEPVKTAPGKKRPVEHSPVEPDSSSGTGKAGQQPARKRLNFGQTGGADSVPDPQPLGQPPAAPTSLGSTTMATGSGAPMADNNEGADGVGNSSGNWHCDSQWLGDRVITTSTRTWALPTYNNHLYKQISSQSGASNDNHYFGHSTPWGYFDFNRFHCHFSPRDWQRLINNNWGFRPKRLNFKLFNIQVKEVTQNDGTTTIANNLTSTVQVFTDSEYQLPYVLGSAHQGCLPPFPADVFMVPQYGYLTLNNGSQAVGRSSFYCLEYFPSQMLRTGNNFTFSYTFEDVPFHSSYAHSQSLDRLMNPLIDQYLYYLNKTQSNSGTLQQSRLLFSQAGPTSMSLQAKNWLPGPCYRQQRLSKQANDNNNSNFPWTAATKYHLNGRDSLVNPGPAMASHKDDEEKFFPMHGTLIFGKQGTNANDADLDNVMITDEEEIRTTNPVATEQYGTVSNNLQNSNTGPTTGTVNHQGALPGMVWQDRDVYLQGPIWAKIPHTDGHFHPSPLMGGFGLKHPPPQIMIKNTPVPANPPTNFSSAKFASFITQYSTGQVSVEIEWELQKENSKRWNPEIQYTSNYNKSVNVDFTVDTNGVYSEPRPIGTRYLTRNL

SEQ ID NO: 4106 - protein, 735 aa, Artificial Sequence
  source: /note="Description of Artificial Sequence: Synthetic polypeptide"
MAADGYLPDWLEDTLSEGIRQWWKLKPGPPPPKPAERHKDDSRGLVLPGYKYLGPFNGLDKGEPVNEADAAALEHGKAYDRQLDSGDNPYLKYNHADAEFQERLKEDTSFGGNLGRAVFQAKKRVLEPLGLVEEPVKTAPGKKRPVEHSPVEPDSSSGTGKAGQQPARKRLNFGQTGDADSVPDPQPLGQPPAAPTSLGSTTMATGSGAPMADNNEGADGVGNSSGNWHCDSQWLGDRVITTSTRTWALPTYNNHLYKQISSQSGASNDNHYFGHSTPWGYFDFNRFHCHFSPRDWQRLINNNWGFRPKRLNFKLFNIQVKEVTQNDGTTTIANNLTSTVQVFTDSEYQLPYVLGSAHQGCLPPFPADVFMVPQYGYLTLNNGSQAVGRSSFYCLEYFPSQMLRTGNNFTFSYTFEDVPFHSSYAHSQSLDRLMNPLIDQYLYYLNKTQSNSGTLQQSRLLFSQAGPTSMSLQAKNWLPGPCYRQQRLSKQANDNNNSNFPWTAATKYHLNGRDSLVNPGPAMASHKDDEEKFFPMHGTLIFGKQGTNANDADLDNVMITDEEEIRTTNPVATEQYGTVSNNLQNSNTGPTTGTVNHQGALPGMVWQDRDVYLQGPIWAKIPHTDGHFHPSPLMGGFGLKHPPPQIMIKNTPVPANPPTNFSSAKFASFITQYSTGQVSVEIEWELQKENSKRWNPEIQYTSNYNKSVNVDFTVDTNGVYSEPRPIGTRYLTRNL

SEQ ID NO: 4107 - protein, 735 aa, Artificial Sequence
  source: /note="Description of Artificial Sequence: Synthetic polypeptide"
MAADGYLPDWLEDTLSEGIRQWWKLKPGPPPPKPAERHKDDSRGLVLPGYKYLGPFNGLDKGEPVNEADAAALEHDKAYDRQLDSGDNPYLKYNHADAEFQERLKEDTSFGGNLGRAVFQAKKRVLEPLGLVEEPVKTAPGKKRPVEHSPVEPDSSSGTGKAGQQPARKRLNFGQTGDADSVPDPQPLGQPPAAPTSLGSTTMATGSGAPMADNNEGADGVGNSSGNWHCDSQWLGDRVITTSTRTWALPTYNNHLYKQISSQSGASNDNHYFGHSTPWGYFDFNRFHCHFSPRDRQRLINNNWGFRPKRLNFKLFNIQVKEVTQNDGTTTIANNLTSTVQVFTDSEYQLPYVLGSAHQGCLPPFPADVFMVPQYGYLTLNNGSQAVGRSSFYCLEYFPSQMLRTGNNFTFSYTFEDVPFHSSYAHSQSLDRLMNPLIDQYLYYLNKTQSNSGTLQQSRLLFSQAGPTSMSLQAKNWLPGPCYRQQRLSKQANDNNNSNFPWTAATKYHLNGRDSLVNPGPAMASHKDDEEKFFPMHGTLIFGKQGTNANDADLDNVMITDEEEIRTTNPVATEQYGTVSNNLQNSNTGPTTGTVNHQGALPGMVWQDRDVYLQGPIWAKIPHTDGHFHPSPLMGGFGLKHPPPQIMIKNTPVPANPPTNFSSAKFASFITQYSTGQVSVEIEWELQKENSKRWNPEIQYTSNYNKSVNVDFTVDTNGVYSEPRPIGTRYLTRNL

SEQ ID NO: 4108 - protein, 735 aa, Artificial Sequence
  source: /note="Description of Artificial Sequence: Synthetic polypeptide"
MAADGYLPDWLEDTLSEGIRQWWKLKPGPPPPKPAERHKDDSRGLVLPGYKYLGPFNGLDKGEPVNEADAAALEHDKAYDRQLDSGDNPYLKYNHADAEFQERLKEDTSFGGNLGRAVFQAKKRVLEPLGLVEEPVKTAPGKKRPVEHSPVEPDSSSGTGKAGQQPARKRLNFGQTGDADSVPDPQPLGQPPAAPTSLGSTTMATGSGAPMADNNEGADGVGNSSGNWHCDSQWLGDRVITTSTRTWALPTYNNHLYKQISSQSGASNDNHYFGHSTPWGYFDFNRFHCHFSPRDWQRLINNNWGFRPKRPNFKLFNIQVKEVTQNDGTTTIANNLTSTVQVFTDSEYQLPYVLGSAHQGCLPPFPADVFMVPQYGYLTLNNGSQAVGRSSFYCLEYFPSQMLRTGNNFTFSYTFEDVPFHSSYAHSQSLDRLMNPLIDQYLYYLNKTQSNSGTLQQSRLLFSQAGPTSMSLQAKNWLPGPCYRQQRLSKQANDNNNSNFPWTAATKYHLNGRDSLVNPGPAMASHKDDEEKFFPMHGTLIFGKQGTNANDADLDNVMITDEEEIRTTNPVATEQYGTVSNNLQNSNTGPTTGTVNHQGALPGMVWQDRDVYLQGPIWAKIPHTDGHFHPSPLMGGFGLKHPPPQIMIKNTPVPANPPTNFSSAKFASFITQYSTGQVSVEIEWELQKENSKRWNPEIQYTSNYNKSVNVDFTVDTNGVYSEPRPIGTRYLTRNL

SEQ ID NO: 4109 - protein, 735 aa, Artificial Sequence
  source: /note="Description of Artificial Sequence: Synthetic polypeptide"
MAADGYLPDWLEDTLSEGIRQWWKLKPGPPPPKPAERHKDDSRGLVLPGYKYLGPFNGLDKGEPVNEADAAALEHDKAYDRQLDSGDNPYLKYNHADAEFQERLKEDTSFGGNLGRAVFQAKKRVLEPLGLVEEPVKTAPGKKRPVEHSPVEPDSSSGTGKAGQQPARKRLNFGQTGDADSVPDPQPLGQPPAAPTSLGSTTMATGSGAPMADNNEGADGVGNSSGNWHCDSQWLGDRVITTSTRTWALPTYNNHLYKQISSQSGASNDNHYFGHSTPWGYFDFNRFHCHFSPRDWQRLINNNWGFRPKRLNFKLFNIQVKEVTQNDGTTTIANNLTSTVQVFTDSEYQLPYVLGSAHQGCLPPFPADVFMVPQYGYLTLNNGSQAVGRSSFYCLEYFPSQMLRTGNNFTFSYTFEDVPFHSSYAHSQSLDRLMNPLIDQYLYYLNKTQSNSGTLQQSRLLFSQAGPTSMSLQAKNWLPGPCYRQQRLSKQANDNNNSNFPWTAATKYHLNGRDSLVNPGPAMASHKDDEEKFFPMHGTLIFGKQGTNANDADLDNVMITDEEEIRTTNPVATEQYGTVSNNLQNSNTGPTTGTVNHQGALPGMVWQDRDVYLQGPIWAKIPHTDGHFHPSPLMGGFGLKHPPPQIMIKNTPVPANPPTNFSSAKFASFITQYSTGQVSVEIEWELQKENSKRWNPEIQYTSNYNKSVNVDFTVGTNGVYSEPRPIGTRYLTRNL

SEQ ID NO: 4110 - protein, 735 aa, Artificial Sequence
  source: /note="Description of Artificial Sequence: Synthetic polypeptide"
MAADGYLPDWLEDTLSEGIRQWWKLKPGPPPPKPAERHKDDSRGLVLPGYKYLGPFNGLDKGEPVNEADAAALEHDKAYDRQLDSGDNPYLKYNHADAEFQERLKEDTSFGGNLGRAVFQAKKRVLEPLGLVEEPVKTAPGKKRPVEHSPVEPDSSSGTGKAGQQPARKRLNFGQTGDADSVPDPQPLGQPPAAPTSLGSTTMATGSGAPMADNNEGADGVGNSSGNWHCDSQWLGDRVITTSTRTWALPTYNNHLYKQISSQSGASNDNHYFGHSTPWGYFDFNRFHCHFSPRDWQRLINNNWGFRPKRLNFKLFNIQVKEVTQNDGTTTIANNLTSTVQVFTDSEYQLPYVLGSAHQGCLPPFPADVFMVPQYGYLTLNNGSQAVGRSSFYCLEYFPSQMLRTGNNFTFSYTFEDVPFHSSYAHSQSLDRLMNPLIDQYLYYLNKTQSNSGTLQQSRLLFSQAGPTSTSLQAKNWLPGPCYRQQRLSKQANDNNNSNFPWTAATKYHLNGRDSLVNPGPAMASHKDDEEKFFPMHGTLIFGKQGTNANDADLDNVMITDEEEIRTTNPVATEQYGTVSNNLQNSNTGPTTGTVNHQGALPGMVWQDRDVYLQGPIWAKIPHTDGHFHPSPLMGGFGLKHPPPQIMIKNTPVPANPPTNFSSAKFASFITQYSTGQVSVEIEWELQKENSKRWNPEIQYTSNYNKSVNVDFTVDTNGVYSEPRPIGTRYLTRNL

SEQ ID NO: 4111 - protein, 735 aa, Artificial Sequence
  source: /note="Description of Artificial Sequence: Synthetic polypeptide"
MAADGYLPDWLEDTLSEGIRQWWKLKPGPPPPKPAERHKDDSRGLVLPGYKYLGPFNGLDKGEPVNEADAAALEHDKAYDRQLDSGDNPYLKYNHADAEFQERLKEDTSFGGNLGRAVFQAKKRVLEPLGLVEEPVKTAPGKKRPVEHSPVEPDSSSGTGKAGQQPARKRLNFGQTGDADSVPDPQPLGQPPAAPTSLGSTTMATGSGAPMADNNEGADGVGNSSGNWHCDSQWLGDRVITTSTRTWALPTYNNHLYKQISSQSGASNDNHYFGHSTPWGYFDFNRFHCHFSPRDWQRLINNNWGFRPKRLNFKLFNIQVKEVTQNDGTTTIANNLTSTVQVFTDSEYQLPYVLGSAHQGCLPPFPADVFMVPQYGYLTLNNGSQAVGRSSFYCLEYFPSQMLRTGNNFTFSYTFEDVPFHSSYAHSQSLDRLMNPLIDQYLYYLNKTQSNSGTLQQSRLLFSQAGPTSMSLQAKNWLPGPCYRQQRLSKQANDNNNSNFPWTAATKYHLNGRDSLVNPGPAMASHKDDEEKFFPMHGTLIFGKQGTNANDADLDNVMITDEEEIRTTNPVATEQYGTVSNNLQNSNTGPTTGTINHQGALPGMVWQDRDVYLQGPIWAKIPHTDGHFHPSPLMGGFGLKHPPPQIMIKNTPVPANPPTNFSSAKFASFITQYSTGQVSVEIEWELQKENSKRWNPEIQYTSNYNKSVNVDFTVDTNGVYSEPRPIGTRYLTRNL

SEQ ID NO: 4112 - protein, 735 aa, Artificial Sequence
  source: /note="Description of Artificial Sequence: Synthetic polypeptide"
MAADGYLPDWLEDTLSEGIRQWWKLKPGPPPPKPAERHKDDSRGLVLPGYKYLGPFNGLDKGEPVNEADAAALEHDKAYDRQLDSGDNPYLKYNHADAEFQERLKEDTSFGGNLGRAVFQAKKRVLEPLGLVEEPVKTAPGKKRPVEHSPVEPDSSSGTGKAGQQPARKRLNFGQTGDADSVPDPQPLGQPPAAPTSLGSTTMATGSGAPMADNNEGADGVGNSSGNWHCDSQWLGDRVITTSTRTWALPTYNNHLYKQISSQSGASNDNHYFGHSTPWGYFDFNRFHCHFSPRDWQRLINNNWGFRPKRLNFKLFNIQVKEVTQNDGTATIANNLTSTVQVFTDSEYQLPYVLGSAHQGCLPPFPADVFMVPQYGYLTLNNGSQAVGRSSFYCLEYFPSQMLRTGNNFTFSYTFEDVPFHSSYAHSQSLDRLMNPLIDQYLYYLNKTQSNSGTLQQSRLLFSQAGPTSMSLQAKNWLPGPCYRQQRLSKQANDNNNSNFPWTAATKYHLNGRDSLVNPGPAMASHKDDEEKFFPMHGTLIFGKQGTNANDADLDNVMITDEEEIRTTNPVATEQYGTVSNNLQNSNTGPTTGTVNHQGALPGMVWQDRDVYLQGPIWAKIPHTDGHFHPSPLMGGFGLKHPPPQIMIKNTPVPANPPTNFSSAKFASFITQYSTGQVSVEIEWELQKENSKRWNPEIQYTSNYNKSVNVDFTVDTNGVYSEPRPIGTRYLTRNL

SEQ ID NO: 4113 - protein, 735 aa, Artificial Sequence
  source: /note="Description of Artificial Sequence: Synthetic polypeptide"
MAADGYLPDWLEDTLSEGIRQWWKLKPGPPPPKPAERHKDDSRGLVLPGYKYLGPFNGLDKGEPVNEADAAALEHDKAYDRQLDSGDNPYLKYNHADAEFQERLKEDTSFGGNLGRAVFQAKKRVLEPLGLVEEPVKTAPGKKRPVEHSPVEPDSSSGTGKAGQQPARKRLNFGQTGDADSVPDPQPLGQPPAAPTSLGSTTMATGSGAPMADNNEGADGVGNSSGNWHCDSQWLGDRVITTSTRTWALPTYNNHLYKQISSQSGASNDNHYFGHSTPWGYFDFNRFHCHFSPRDWQRLINNNWGFRPKRLNFKLFNIQVKEVTQNDGTTTIANNLTSTVQVFTDSEYQLPYVLGSAHQGCLPPFPADVFMVPQYGYLTLNNGSQAVGRSSFYCLEYFPSQMLRTGNNFTFSYTFEDVPFHSSYAHSQSLDRLMNPLIDQYLYYLNKTQSNSGTLQQSRLLFSQAGPTSMSLQAKNWLPGPCYRQQRLSKQANDNNNSNFPWTVATKYHLNGRDSLVNPGPAMASHKDDEEKFFPMHGTLIFGKQGTNANDADLDNVMITDEEEIRTTNPVATEQYGTVSNNLQNSNTGPTTGTVNHQGALPGMVWQDRDVYLQGPIWAKIPHTDGHFHPSPLMGGFGLKHPPPQIMIKNTPVPANPPTNFSSAKFASFITQYSTGQVSVEIEWELQKENSKRWNPEIQYTSNYNKSVNVDFTVDTNGVYSEPRPIGTRYLTRNL

SEQ ID NO: 4114 - protein, 735 aa, Artificial Sequence
  source: /note="Description of Artificial Sequence: Synthetic polypeptide"
MAADGYLPDWLEDTLSEGIRQWWKLKPGPPPPKPAERHKDDSRGLVLPGYKYLGPFNGLDKGEPVNEADAAALEHDKAYDRQLDSGDNPYLKYNHADAEFQERLKEDTSFGGNLGRAVFQAKKRVLEPLGLVEEPVKTAPGKKRPVEHSPVEPDSSSGTGKAGQQPARKRLNFGQTGDADSVPDPQPLGQPPAAPTSLGSTTMATGSGAPMADNNEGADGVGNSSGNWHCDSQWLGDRVITTSTRTWALPTYNNHLYKQISSQSGASNDNHYFGHSTPWGYFDFNRFHCHFSPRDWQRLINNNWGFRPKRLNFKLFNIQVKEVTQNDGTTTIANNLTSTVQVFTDSEYQLPYVLGSAHQGCLPPFPADVFMVPQYGYLTLNNGSQAVGRSSFYCLEYFPSQMLRTGNNFTFSYTFEDVPFHSSYAHSQSLDRLMNPLIDQYLYYLNKTQSNSGTLQQSRLLFSQAGPTSMSLQAKNWLPGPCYRQQRLSKQANDNNNSNFPWTAATKYHLNGRDSLVNPGPAMASHKDDEEKFFPMHGTLIFGKQGTNANDADLDNVMITDEEEIRTTNPVATEQYGTVSNNLQNSNTGPTTGTVNHQGALPGMVWQDRDVYLQGPIWAKIPHTDGHFHPSPLMGGFGLKHPPPQIMIKNTPVPANPPTNFSSAKFASFITQHSTGQVSVEIEWELQKENSKRWNPEIQYTSNYNKSVNVDFTVDTNGVYSEPRPIGTRYLTRNL

SEQ ID NO: 4115 - protein, 735 aa, Artificial Sequence
  source: /note="Description of Artificial Sequence: Synthetic polypeptide"
MAADGYLPDWLEDTLSEGIRQWWKLKPGPPPPKPAERHKDDGRGLVLPGYKYLGPFNGLDKGEPVNEADAAALEHDKAYDRQLDSGDNPYLKYNHADAEFQERLKEDTSFGGNLGRAVFQAKKRVLEPLGLVEEPVKTAPGKKRPVEHSPVEPDSSSGTGKAGQQPARKRLNFGQTGDADSVPDPQPLGQPPAAPTSLGSTTMATGSGAPMADNNEGADGVGNSSGNWHCDSQWLGDRVITTSTRTWALPTYNNHLYKQISSQSGASNDNHYFGYSTPWGYFDFNRFHCHFSPRDWQRLINNNWGFRPKRLNFKLFNIQVKEVTQNDGTTTIANNLTSTVQVFTDSEYQLPYVLGSAHQGCLPPFPADVFMVPQYGYLTLNNGSQAVGRSSFYCLEYFPSQMLRTGNNFTFSYTFEDVPFHSSYAHSQSLDRLMNPLIDQYLYYLNKTQSNSGTLQQSRLLFSQAGPTSMSLQAKNWLPGPCYRQQRLSKQANDNNNSNFPWTAATKYHLNGRDSLVNPGPAMASHKDDEEKFFPMHGTLIFGKQGTNANDADLDNVMITDEEEIRTTNPVATEQYGTVSNNLQNSNTGPTTGTVNHQGALPGMVWQDRDVYLQGPIWAKIPHTDGHFHPSPLMGGFGLKHPPPQIMIKNTPVPANPPTNFSSAKFASFITQYSTGQVSVEIEWELQKENSKRWNPEIQYTSNYNKSVNVDFTVDTNGVYSEPRPIGTRYLTRNL

SEQ ID NO: 4116 - protein, 735 aa, Artificial Sequence
  source: /note="Description of Artificial Sequence: Synthetic polypeptide"
MAADGYLPDWLEDTLSEGIRQWWKLKPGPPPPKPAERHKDDSRGLVLPGYKYLGPFNGLDKGEPVNEADAAALEHDKAYDRQLDSGDNPYLKYNHADAELQERLKEDTSFGGNLGRAVFQAKKRVLEPLGLVEEPVKTAPGKKRPVEHSPVEPDSSSGTGKAGQQPARKRLNFGQTGDADSVPDPQPLGQPPAAPTSLGSTTMATGSGAPMADNNEGADGVGNSSGNWHCDSQWLGDRVITTSTRTWALPTYNNHLYKQISSQSGASNDNHYFGYSTPWGYFDFNRFHCHFSPRDWQRLINNNWGFRPKRLNFKLFNIQVKEVTQNDGTTTIANNLTSTVQVFTDSEYQLPYVLGSAHQGCLPPFPADVFMVPQYGYLTLNNGSQAVGRSSFYCLEYFPSQMLRTGNNFTFSYTFEDVPFHSSYAHSQSLDRLMNPLIDQYLYYLNKTQSNSGTLQQSRLLFSQAGPTSMSLQAKNWLPGPCYRQQRLSKQANDNNNSNFPWTAATKYHLNGRDSLVNPGPAMASHKDDEEKFFPMHGTLIFGKQGTNANDADLDNVMITDEEEIRTTNPVATEQYGTVSNNLQNSNTGPTTGTVNHQGALPGMVWQDRDVYLQGPIWAKIPHTDGHFHPSPLMGGFGLKHPPPQIMIKNTPVPANPPTNFSSAKFASFITQYSTGQVSVEIEWELQKENSKRWNPEIQYTSNYNKSVNVDFTVDTNGVYSEPRPIGTRYLTRNL

SEQ ID NO: 4117 - protein, 735 aa, Artificial Sequence
  source: /note="Description of Artificial Sequence: Synthetic polypeptide"
MAADGYLPDWLEDTLSEGIRQWWKLKPGPPPPKPAERHKDDSRGLVLPGYKYLGPFNGLDKGEPVNEADAAALEHDKAYDRQLDSGDNPYLKYNHADAEFQERLKEDTSFGGNLGRAVFQAKKRVLEPLGLVEEPVKTAPGKKRPVEHSPVEPDSSSGTGKAGQQPARKRLNFGQTGDADSVPDPQPLGQPPAAPTSLGSTTMATGSGAPMADNNEGADGVGNSSGNWHCDSQWLGDRVITTSTRTWALPTYNNHLYKQISSQSGASNDNHYFGYSTPWGYFDFNRFHCHFSPRDWQRLINNNWGFRPKRLNFKLFNIQVKEVTQNDGTTTIANNLTSTVQVFTDSEYQLPYVLGSAHQGCLPPFPADVFMVPQYGYLTLNNGSQAVGRSSFYCLEYFPSQMLRTGNNFTFSYTFEDVPFHSSYAHSQSLDRLMNPLIDQYLYYLNKTQSNSGTLQQSRLLFSQAGPTSMSLQAKNWLPGPCYRQQRLSKQANDNNNSNFPWTAATKYHLNGRDSLVNPGPAMASHKDDEEKFFPMHGTLIFGKQGTNANDADLDNVMITDEEEIRTTNPVATEQYGTVSNNLQNSNTGPTTGTVNHQGALPGMVWQDRDVYLQGPIWAKIPHTDGHFHPSPLVGGFGLKHPPPQIMIKNTPVPANPPTNFSSAKFASFITQYSTGQVSVEIEWELQKENSKRWNPEIQYTSNYNKSVNVDFTVDTNGVYSEPRPIGTRYLTRNL

SEQ ID NO: 4118 - protein, 735 aa, Artificial Sequence
  source: /note="Description of Artificial Sequence: Synthetic polypeptide"
MAADGYLPDWLEDTLSEGIRQWWKLKPGPPPPKPAERHKDDSRGLVLPGYKYLGPFNGLDKGEPVNEADAAALEHDKAYDRQLDSGDNPYLKYNHADAEFQERLKEDTSFGGNLGRAVFQAKKRVLEPLGLVEEPVKTAPGKKRPVEHSPVEPDSSSGTGKAGQQPARKRLNFGQTGDADSVPDPQPLGQPPAAPTSLGSTTMATGSGAPMADNNEGADGVGNSSGNWHCDSQWLGDRVITTSTRTWALPTYNNHLYKQISSQSGASNDNHYFGYSTPWGYFDFNRFHCHFSPRDWQRLINNNWGFRPKRLNFKLFNIQVKEVTQNDGTTTIANNLTSTVQVFTDSEYQLPYVLGSAHQGCLPPFPADVFMVPQYGYLTLNNGSQAVGRSSFYCLEYFPSQMLRTGNNFTFSYTFEDVPFHSSYAHSQSLDRLMNPLIDQYLYYLNKTQSNSGTLQQSRLLFSQAGPTSMSLQAKNWLPGPCYRQQRLSKQANDNNNSNFPWTAATKYHLNGRDSLVNPGPAMASHKDDEEKFFPMHGTLIFGKQGTNANDADLDNVMITDEEEIRTTNPVATEQYGTVSNNLQNSNTGPTTGTVNHQGALPGMVWQDRDVYLQGPIWAKIPHTDGHFHPSPLMGGFGLKHPPPQIMIKNTPVPANPPTNFSSAKFASFITQYSTGQVGVEIEWELQKENSKRWNPEIQYTSNYNKSVNVDFTVDTNGVYSEPRPIGTRYLTRNL

SEQ ID NO: 4119 - protein, 735 aa, Artificial Sequence
  source: /note="Description of Artificial Sequence: Synthetic polypeptide"
MAADGYLPDWLEDTLSEGIRQWWKLKPGPPPPKPAERHKDDSRGLVLPGYKYLGPFNGLDKGEPVNEADAAALEHDKAYDRQLDSGDNPYLKYNHADAEFQERLKEDTSFGGNLGRAVFQAKKRVLEPLGLVEEPVKTAPGKKRPVEHSPVEPDSSSGTGKAGQQPARKRLNFGQTGDADSVPDPQPLGQPPAAPTSLGSTTMATGSGAPMADNNEGADGVGNSSGNWHCDSQWLGDRVITTSTRTWALPTYNNHLYKQISSQSGASNDNHYFGYSTPWGYFDFNRFHCHFSPRDWQRLINNNWGFRPKRLNFKLFNIQVKEVTQNDGTTTIANNLTSTVQVFTDSEYQPPYVLGSAHQGCLPPFPADVFMVPQYGYLTLNNGSQAVGRSSFYCLEYFPSQMLRTGNNFTFSYTFEDVPFHSSYAHSQSLDRLMNPLIDQYLYYLNKTQSNSGTLQQSRLLFSQAGPTSMSLQAKNWLPGPCYRQQRLSKQANDNNNSNFPWTAATKYHLNGRDSLVNPGPAMASHKDDEEKFFPMHGTLIFGKQGTNANDADLDNVMITDEEEIRTTNPVATEQYGTVSNNLQNSNTGPTTGTVNHQGALPGMVWQDRDVYLQGPIWAKIPHTDGHFHPSPLMGGFGLKHPPPQIMIKNTPVPANPPTNFSSAKFASFITQYSTGQVSVEIEWELQKENSKRWNPEIQYTSNYNKSVNVDFTVDTNGVYSEPRPIGTRYLTRNL

SEQ ID NO: 4120 - protein, 735 aa, Artificial Sequence
  source: /note="Description of Artificial Sequence: Synthetic polypeptide"
MAADGYLPDWLEDTLSEGIRQWWKLKPGPPPPKPAERHKDDSRGLVLPGYKYLGPFNGLDKGEPVNEADAAALEHDKAYDRQLDSGDNPYLKYNHADAEFQERLKEDTSFGGNLGRAVFQAKKRVLEPLGLVEEPVKTAPGKKRPVEHSPVEPDSSSGTGKAGQQPARKRLNFGQTGDADSVPDPQPLGQPPAAPTSLGSTTMATGSGAPMADNDEGADGVGNSSGNWHCDSQWLGDRVITTSTRTWALPTYNNHLYKQISSQSGASNDNHYFGYSTPWGYFDFNRFHCHFSPRDWQRLINNNWGFRPKRLNFKLFNIQVKEVTQNDGTTTIANNLTSTVQVFTDSEYQLPYVLGSAHQGCLPPFPADVFMVPQYGYLTLNNGSQAVGRSSFYCLEYFPSQMLRTGNNFTFSYTFEDVPFHSSYAHSQSLDRLMNPLIDQYLYYLNKTQSNSGTLQQSRLLFSQAGPTSMSLQAKNWLPGPCYRQQRLSKQANDNNNSNFPWTAATKYHLNGRDSLVNPGPAMASHKDDEEKFFPMHGTLIFGKQGTNANDADLDNVMITDEEEIRTTNPVATEQYGTVSNNLQNSNTGPTTGTVNHQGALPGMVWQDRDVYLQGPIWAKIPHTDGHFHPSPLMGGFGLKHPPPQIMIKNTPVPANPPTNFSSAKFASFITQYSTGQVSVEIEWELQKENSKRWNPEIQYTSNYNKSVNVDFTVDTNGVYSEPRPIGTRYLTRNL

SEQ ID NO: 4121 - protein, 735 aa, Artificial Sequence
  source: /note="Description of Artificial Sequence: Synthetic polypeptide"
MAADGYLPDWLEDTLSEGIRQWWKLKPGPPPPKPAERHKDDSRGLVLPGYKYLGPFNGLDKGEPVNEADAAALEHDKAYDRQLDSGDNPYLKYNHADAEFQERLKEDTSFGGNLGRAVFQAKKRVLEPLGLVEEPVKTAPGKKRPVEHSPVEPDSSSGTGKAGQQPARKRLNFGQTGDADSVPDPQPLGQPPAAPTSLGSTTMATGSGAPMADNNEGADGVGNSSGNWHCDSQWLGDRVITTSTRTWALPTYNNHLYKQISSQSGASNDNHYFGYSTPWGYFDFNRFHCHFSPRDWQRLINNNWGFRPKRLNFKLFNIQVKEVTQNDGTTTIANNLTSTVQVFTDSEYQLPYVLGSAHQGCLPPFPADVFMVPQYGYLTLNNGSQAVGRSSFYCLEYFPSQMLRTGNNFTFSYTFEDVPFHSSYAHSQSLDRLMNPLIDQYLYYLNKTQSNSGTLQQSRLLFSQAGPTSMSLQAKNWLPGPCYRQQRLPKQANDNNNSNFPWTAATKYHLNGRDSLVNPGPAMASHKDDEEKFFPMHGTLIFGKQGTNANDADLDNVMITDEEEIRTTNPVATEQYGTVSNNLQNSNTGPTTGTVNHQGALPGMVWQDRDVYLQGPIWAKIPHTDGHFHPSPLMGGFGLKHPPPQIMIKNTPVPANPPTNFSSAKFASFITQYSTGQVSVEIEWELQKENSKRWNPEIQYTSNYNKSVNVDFTVDTNGVYSEPRPIGTRYLTRNL

SEQ ID NO: 4122 - protein, 735 aa, Artificial Sequence
  source: /note="Description of Artificial Sequence: Synthetic polypeptide"
MAADGYLPDWLEDTLSEGIRQWWKLKPGPPPPKPAERHKDDSRGLVLPGYKYLGPFNGLDKGEPVNEADAAALEHDKAYDRQLDSGDNPYLKYNHADAEFQERLKEDTSFGGNLGRAVFQAKKRVLEPLGLVEEPVKTAPGKKRPVEHSPVEPDSSSGTGKAGQQPARKRLNFGQTGDADSVPDPQPLGQPPAAPTSLGSTTMATGSGAPMADNNEGADGVGNSSGNWHCDSQWLGDRVITTSTRTWALPTYNNHLYKQISSQSGASNDNHYFGYSTPWGYFDFNRFHCHFSPRDWQRLINNNWGFRPKRLNFKLFNIQVKEVTQNDGTTTIANNLTSTVQVFTDSEYQLPYVLGSAHQGCLPPFPADVFMVPQYGYLTLNNGSQAVGRSSFYCLEYFPSQMLRTGNNFTFSYTFEDVPFHSSYAHSQSLDRLMNPLIDQYLYYLNKTQSNSGTLQQSRLLFSQAGPTSMSLQAKNWLPGPCYRQQRLSKQANDNNNSNFPWTAATKYHLNGRDSLVNPGPAMASHKDDEEKFFPMHGTLIFGKQGTNANDADLDNVMITDEEEIRTTNPVATEQYGTVSNNLQNSNTGPTTGTVNHQGALPGMVWQDRDVYLQGPIWAKIPHTDGHFHPSPLMGGFGLKHPPPQIMIKNTPVPANPPTNLSSAKFASFITQYSTGQVSVEIEWELQKENSKRWNPEIQYTSNYNKSVNVDFTVDTNGVYSEPRPIGTRYLTRNL

SEQ ID NO: 4123 - protein, 735 aa, Artificial Sequence
  source: /note="Description of Artificial Sequence: Synthetic polypeptide"
MAADGYLPDWLEDTLSEGIRQWWKLKPGPPPPKPAERHKDDSRGLVLPGYKYLGPFNGLDKGEPVNEADAAALEHDKAYDRQLDSGDNPYLKYNHADAEFQERLKEDTSFGGNLGRAVFQAKKRVLEPLGLVEEPVKTAPGKKRPVEHSPVEPDSSSGTGKAGQQPARKRLNFGQTGDADSVPDPQPLGQPPAAPTSLGSTTMATGSGAPMADNNEGADGVGNSSGNWHCDSQWLGDRVITTSTRTWALPTYNNHLYKQISSQSGASNDNHYFGYSTPWGYFDFNRFHCHFSPRDWQRLINNNWGFRPKRLNFKLFNIQVKEVTQNDGTTTIANNLTSTVQVFTDSEYQLPYVLGSAHQGCLPPFPADVFMVPQYGYLTPNNGSQAVGRSSFYCLEYFPSQMLRTGNNFTFSYTFEDVPFHSSYAHSQSLDRLMNPLIDQYLYYLNKTQSNSGTLQQSRLLFSQAGPTSMSLQAKNWLPGPCYRQQRLSKQANDNNNSNFPWTAATKYHLNGRDSLVNPGPAMASHKDDEEKFFPMHGTLIFGKQGTNANDADLDNVMITDEEEIRTTNPVATEQYGTVSNNLQNSNTGPTTGTVNHQGALPGMVWQDRDVYLQGPIWAKIPHTDGHFHPSPLMGGFGLKHPPPQIMIKNTPVPANPPTNFSSAKFASFITQYSTGQVSVEIEWELQKENSKRWNPEIQYTSNYNKSVNVDFTVDTNGVYSEPRPIGTRYLTRNL

SEQ ID NO: 4124 - protein, 735 aa, Artificial Sequence
  source: /note="Description of Artificial Sequence: Synthetic polypeptide"
MAADGYLPDWLEDTLSEGIRQWWKLKPGPPPPKPAERHKDDSRGLVLPGYKYLGPFNGLDKGEPVNEADAAALEHDKAYDRQLDSGDNPYLKYNHADAEFQERLKEDTSFGGNLGRAVFQAKKRVLEPLGLVEEPVKTAPGKKRPVEHSPVEPDSSSGTGKAGQQPARKRLNFGQTGDADSVPDPQPLGQPPAAPTSLGSTTMATGSGAPMADNNEGADGVGNSSGNWHCDSQWLGDRVITTSTRTWALPTYNNHLYKQISSQSGASNDNHYFGYSTPWGYFDFNRFHCHFSPRDWQRLINNNWGFRPKRLNFKLFNIQVKEVTQNDGTTTIANNLTSTVQVFTDSEYQLPYVLGSAHQGCLPPFPADVFMVPQYGYLTLNNGSQAVGRSSFYCLEYFPSQMLRTGNNFTFSYTFEDVPFHSSYAHSQSLDRLMNPLIDQYLYYLNKTQSNSGTLRQSRLLFSQAGPTSMSLQAKNWLPGPCYRQQRLSKQANDNNNSNFPWTAATKYHLNGRDSLVNPGPAMASHKDDEGKFFPMHGTLIFGKQGTNANDADLDNVMITDEEEIRTTNPVATEQYGTVSNNLQNSNTGPTTGTVNHQGALPGMVWQDRDVYLQGPIWAKIPHTDGHFHPSPLMGGFGLKHPPPQIMIKNTPVPANPPTNFSSAKFASFITQYSTGQVSVEIEWELQKENSKRWNPEIQYTSNYNKSVNVDFTVDTNGVYSEPRPIGTRYLTRNL

SEQ ID NO: 4125 - protein, 735 aa, Artificial Sequence
  source: /note="Description of Artificial Sequence: Synthetic polypeptide"
MAADGYLPDWLEDTLSEGIRQWWKLKPGPPPPKPAERHKDDSRGLVLPGYKYLGPFNGLDKGEPVNEADAAALEHDKAYDRQLDSGDNPYLKYNHADAEFQERLKEDTSFGGNLGRAVFQAKKRVLEPLGLVEEPVKTAPGKKRPVEHSPVEPDSSSGTGKAGQQPARKRLNFGQTGDADSVPDPQPLGQPPAAPTSLGSTTMATGSGAPMADNNEGADGVGNSSGNWHCDSQWLGDRVITTSTRTWALPTYNNHLYKQISSQSGASNDNHYFGYSTPWGYFDFNRFHCHFSPRDWQRLINNNWGFRPKRLNFKLFNIQVKEVTQNDGTTTIANNLTSTVQVFTDSEYQLPYVLGSAHQGCLPPFPADVFMVPQYGYLTLNNGSQAVGRSSFYCLEYFPSQMLRTGNNFTFSYTFEDVPFHSSYAHSQSLDRLMNPLIDQYLYYLNKTQSNSGTLQQSRLLFSQAGPTSMSLQAKNWLPGPCYRQQRLSKQANDNNNSNFPWTAATKYHLNGRDSLVNPGPAMASHKDDEEKFFPMHGTLIFGKQGTNANDADLDNAMITDEEEIRTTNPVATEQYGTVSNNLQNSNTGPTTGTVNHQGALPGMVWQDRDVYLQGPIWAKIPHTDGHFHPSPLMGGFGLKHPPPQIMIKNTPVPANPPTNFSSAKFASFITQYSTGQVSVEIEWELQKENSKRWNPEIQYTSNYNKSVNVDFTVDTNGVYSEPRPIGTRYLTRNL

SEQ ID NO: 4126 - protein, 735 aa, Artificial Sequence
  source: /note="Description of Artificial Sequence: Synthetic polypeptide"
MAADGYLPDWLEDTLSEGIRQWWKLKPGPPPPKPAERHKDDSRGLVLPGYKYLGPFNGLDKGEPVNEADAAALEHDKAYDRQLDSGDNPYLKYNHADAEFQERLKEDTSFGGNLGRAVFQAKKRVLEPLGLVEEPVKTAPGKKRPVEHSPVEPDSSSGTGKAGQQPARKRLNFGQTGDADSVPDPQPLGQPPAAPTSLGSTTMATGSGAPMAGNNEGADGVGNSSGNWHCDSQWLGDRVITTSTRTWALPTYNNHLYKQISSQSGASNDNHYFGYSTPWGYFDFNRFHCHFSPRDWQRLINNNWGFRPKRLNFKLFNIQVKEVTQNDGTTTIANNLTSTVQVFTDSEYQLPYVLGSAHQGCLPPFPADVFMVPQYGYLTLNNGSQAVGRSSFYCLEYFPSQMLRTGNNFTFSYTFEDVPFHSSYAHSQSLDRLMNPLIDQYLYYLNKTQSNSGTLQQSRLLFSQAGPTSMSLQAKNWLPGPCYRQQRLSKQANDNNNSNFPWTAATKYHLNGRDSLVNPGPAMASHKDDEEKFFPMHGTLIFGKQGTNANDADLDNVMITDEEEIRTTNPVATEQYGTVSNNLQNSNTGPTTGTVNHQGALPGMVWQDRDVYLQGPIWAKIPHTDGHFHPSPLMGGFGLKHPPPQIMIKNTPVPANPPTNFSSAKFASFITQYSTGQVSVEIEWELQKENSKRWNPEIQYTSNYNKSVNVDFTVDTNGVYSEPRPIGTRYLTRNL

SEQ ID NO: 4127 - protein, 735 aa, Artificial Sequence
  source: /note="Description of Artificial Sequence: Synthetic polypeptide"
MAADGYLPDWLEDTLSEGIRQWWKLKPGPPPPKPAERHKDDSRGLVLPGYKYLGPFNGLDKGEPVNEADAAALEHDKAYDRQLDSGDNPYLKYNHADAEFQERLKEDTSFGGNLGRAVFQAKKRVLEPLGLVEEPVKTAPGKKRPVEHSPVEPDSSSGTGKAGQQPARKRLNFGQTGDADSVPDPQPLGQPPAAPTSLGSTTMATGSGAPMADNNEGADGVGNSSGNWHCDSQWLGDRVITTSTRTWALPTYNNHLYKQISSQSGASNDNHYFGYSTPWGYFDFNRFHCHFSPRDWQRLINNNWGFRPKRLNFKLFNIQVKEVAQNDGTTTIANNLTSTVQVFTDSEYQLPYVLGSAHQGCLPPFPADVFMVPQYGYLTLNNGSQAVGRSSFYCLEYFPSQMLRTGNNFTFSYTFEDVPFHSSYAHSQSLDRLMNPLIDQYLYYLNKTQSNSGTLQQSRLLFSQAGPTSMSLQAKNWLPGPCYRQQRLSKQANDNNNSNFPWTAATKYHLNGRDSLVNPGPAMASHKDDEEKFFPMHGTLIFGKQGTNANDADLDNVMITDEEEIRTTNPVATEQYGTVSNNLQNSNTGPTTGTVNHQGALPGMVWQDRDVYLQGPIWAKIPHTDGHFHPSPLMGGFGLKHPPPQIMIKNTPVPANPPTNFSSAKFASFITQYSTGQVSVEIEWELQKENSKRWNPEIQYTSNYNKSVNVDFTVDTNGVYSEPRPIGTRYLTRNL

SEQ ID NO: 4128 - protein, 735 aa, Artificial Sequence
  source: /note="Description of Artificial Sequence: Synthetic polypeptide"
MAADGYLPDWLEDTLSEGIRQWWKLKPGPPPPKPAERHKDDSRGLVLPGYKHLGPFNGLDKGEPVNEADAAALEHDKAYDRQLDSGDNPYLKYNHADAEFQERLKEDTSFGGNLGRAVFQAKKRVLEPLGLVEEPVKTAPGKKRPVEHSPVEPDSSSGTGKAGQQPARKRLNFGQTGDADSVPDPQPLGQPPAAPTSLGSTTMATGSGAPMADNNEGADGVGNSSGNWHCDSQWLGDRVITTSTRTWALPTYNNHLYKQISSQSGASNDNHYFGYSTPWGYFDFNRFHCHFSPRDWQRLINNNWGFRPKRLNFKLFNIQVKEVTQNDGTTTIANNLTSTVQVFTDSEYQLPYVLGSAHQGCLPPFPADVFMVPQYGYLTLNNGSQAVGRSSFYCLEYFPSQMLRTGNNFTFSYTFEDVPFHSSYAHSQSLDRLMNPLIDQYLYYLNKTQSNSGTLQQSRLLFSQAGPTSMSLQAKNWLPGPCYRQQRLSKQANDNNNSNFPWTAATKYHLNGRDSLVNPGPAMASHKDDEEKFFPMHGTLIFGKQGTNANDADLDNVMITDEEEIRTTNPVATEQYGTVSNNLQNSNTGPTTGTVNHQGALPGMVWQDRDVYLQGPIWAKIPHTDGHFHPSPLMGGFGLKHPPPQIMIKNTPVPANPPTNFSSAKFASFITQYSTGQVSVEIEWELQKENSKRWNPEIQYTSNYNKSVNVDFTVDTNGVYSEPRPIGTRYLTRNL

SEQ ID NO: 4129 - protein, 735 aa, Artificial Sequence
  source: /note="Description of Artificial Sequence: Synthetic polypeptide"
MAADGYLPDWPEDTLSEGIRQWWKLKPGPPPPKPAERHKDDSRGLVLPGYKYLGPFNGLDKGEPVNEADAAALEHDKAYDRQLDSGDNPYLKYNHADAEFQERLKEDTSFGGNLGRAVFQAKKRVLEPLGLVEEPVKTAPGKKRPVEHSPVEPDSSSGTGKAGQQPARKRLNFGQTGDADSVPDPQPLGQPPAAPTSLGSTTMATGSGAPMADNNEGADGVGNSSGNWHCDSQWLGDRVITTSTRTWALPTYNNHLYKQISSQSGASNDNHYFGYSTPWGYFDFNRFHCHFSPRDWQRLINNNWGFRPKRLNFKLFNIQVKEVTQNDGTTTIANNLTSTVQVFTDSEYQLPYVLGSAHQGCLPPFPADVFMVPQYGYLTLNNGSQAVGRSSFYCLEYFPSQMLRTGNNFTFSYTFEDVPFHSSYAHSQSLDRLMNPLIDQYLYYLNKTQSNSGTLQQSRLLFSQAGPTSMSLQAKNWLPGPCYRQQRLSKQANDNNNSNFPWTAATKYHLNGRDSLVNPGPAMASHKDDEEKFFPMHGTLIFGKQGTNANDADLDNVMITDEEEIRTTNPVATEQYGTVSNNLQNSNTGPTTGTVNHQGALPGMVWQDRDVYLQGPIWAKIPHTDGHFHPSPLMGGFGLKHPPPQIMIKNTPVPANPPTNFSSAKFASFITQYSTGQVSVEIEWELQKENSKRWNPEIQYTSNYNKSVNVDFTVDTNGVYSEPRPIGTRYLTRNL

SEQ ID NO: 4130 - protein, 735 aa, Artificial Sequence
  source: /note="Description of Artificial Sequence: Synthetic polypeptide"
MAADGYLPDWLEDTLSEGIRQWWKLKPGPPPPKPAERHKDDSRGLVLPGYKYLGPFNGLDKGEPVNEADAAALEHDKAYDRQLDSGDNPYLKYNHADAEFQERLKEDTSFGGNLGRAVFQAKKRVLEPLGLVEEPVKTAPGKKRPVEHSPVEPDSSSGTGKAGQQPARKRLNFGQTGDADSVPDPQPLGQPPAAPTSLGSTTMATGSGAPMADNNEGADGVGNSSGNWHCDSQWLGDRVITTSTRTWALPTYNNHLYKQISSQSGASNDNHYFGYSTPWGYFDFNRFHCHFSPRDWQRLINNNWGFRPKRLNFKLFNIQVKEVTQNDGTTTIANNLTSTVQVFTDSEYQLPYVLGSAHQGCLPPFPADVFMVPQYGYLTLNNGSQAVGRSSFYCLEYFPSQMLRTGNNFTFSYTFEDVPFHSSYAHSQSLDRLMNPLIDQYLYYLNKTQSNSGTLQQSRLLFSQAGPTSMSLQAKNWLPGPCYRQQRLSKQANDNNNSNFPWTAATKYHLNGRDSLVNPGPAMASHKDDEEKFFPMHGTLIFGKQGTNANDADLDNVMITDEEEIRTTNPVATEQYGTVSNNLQNSNTGPTTGTVNHQGALPGMVWQDRGVYLQGPIWAKIPHTDGHFHPSPLMGGFGLKHPPPQIMIKNTPVPANPPTNFSSAKFASFITQYSTGQVSVEIEWELQKENSKRWNPEIQYTSNYNKSVNVDFTVDTNGVYSEPRPIGTRYLTRNL

SEQ ID NO: 4131 - protein, 735 aa, Artificial Sequence
  source: /note="Description of Artificial Sequence: Synthetic polypeptide"
MAADGYLPDWLEDTLSEGIRQWWKLKPGPPPPKPAERHKDDSRGLVLPGYKYLGPFNGLDKGEPVNEADAAALEHDKAYDRQLDSGDNPYLKYNHADAEFQERLKEDTSFGGNLGRAVFQAKKRVLEPLGLVEEPVKTAPGKKRPVEHSPVEPDSSSGTGKAGQQPARKRLNFGQTGDADSVPDPQPLGQPPAAPTSLGSTTMATGSGAPMADNNEGADGVGNSSGNWHCDSQWLGDRVITTSTRTWALPTYNNHLYKQISSQSGASNDNHYFGYSTPWGYFDFNRFHCHFSPRDWQRLINNNWGFRPKRLNFKLFNIQVKEVTQNDGTTTIANNLTSTVQVFTDSEYQLPYVLGSAHQGCLPPFPADVFMVPQYGYLTLNNGSQAVGRSSFYCLEYFPSQMLRTGNNFTFSYTFEDVPFHSSYAHSQSLDRLMNPLIDQYLYYLNKTQSNSGTLQQSRLLFSQAGPTSMSLQAKNWLPGPCYRQQRLSKQANDNNNSNFPWTAATKYHLNGRDSLVNPGPAMASHKDDEEKFFPMHGTLIFGKQGTNANDADLDNVMITDEEEIRTTNPVATEQYGTVSNNLQNSNTGPTTGTVNHQGALPGMVWQDRDVYLQGPIWAKIPHTDGHFHPSPLMGGFGLKHPPPQIMIKNTPVPANPPTNFSSAKFASFITQYSTGQVSVEIEWELQKENSKRWNPEIQYTSNYNKSVNVDFTVGTNGVYSEPRPIGTRYLTRNL

SEQ ID NO: 4132 - protein, 735 aa, Artificial Sequence
  source: /note="Description of Artificial Sequence: Synthetic polypeptide"
MAADGYLPDWLEDTLSEGIRQWWKLKPGPPPPKPAERHQDDSRGLVLPGYKYLGPLNGLDKGEPVNEADAAALEHDKAYDRQLDSGDNPYLKYNHADAEFQERLKEDTSFGGNLGRAVFQAKKRVLEPLGLVEEPVKTAPGKKRPVEHSPAEPDSSSGTGKAGQQPARKRLNFGQTGDADSVPDPQPLGQPPAAPTSLGSTTMATGSGAPMADNNEGADGVGNSSGNWHCDSQWLGDRVITTSTRTWALPTYNNHLYKQISSQSGASNDNHYFGYSTPWGYFDFNRFHCHFSPRDWQRLINNNWGFRPKRLNFKLFNIQVKEVTQNDGTTTIANNLTSTVQVFTDSEYQLPYVLGSAHQGCLPPFPADVFMVPQYGYLTLNNGSQAVGRSSFYCLEYFPSQMLRTGNNFTFSYTFEDVPFHSSYAHSQSLDRLMNPLIDQYLYYLNRTQSNSGTLQQSRLLFSQAGPTSMSLQAKNWLPGPCYRQQRLSKQANDNNNSNFPWTAATKYHLNGRDSLVNPGPAMASHKDDEEKFFPMHGTLIFGKQGTNANDADLEHVMITDEEEIRTTNPVATEQYGNVSNNLQNSNTGPTTENVNHQGALPGMVWQDRDVYLQGPIWAKIPHTDGHFHPSPLMGGFGLKHPPPQIMIKNTPVPANPPTNFSAAKFASFITQYSTGQVSVEIEWELQKENSKRWNPEIQYTSNYNKSVNVDFTVDTNGVYSEPRPIGTRYLTRNL

SEQ ID NO: 4133 - protein, 735 aa, Artificial Sequence
  source: /note="Description of Artificial Sequence: Synthetic polypeptide"
MAADGYLPDWLEDTLSEGIRQWWKLKPGPPPPKPAERHQDDSRGLVLPGYKYLGPFNGLDKGEPVNEADAAALEHDKAYDRQLDSGDNPYLKYNHADAEFQERLKEDTSFGGNLGRAVFQAKKRVLEPLGLVEEPVKTAPGKKRPVEHSPAEPDSSSGTGKAGQQPARKRLNFGQTGDADSVPDPQPLGQPPAAPTSLGSTTMATGSGAPMADNNEGADGVGNSSGNWHCDSQWLGDRVITTSTRTWALPTYNNHLYKQISSQSGASNDNHYFGYSTPWGYFDFNRFHCHFSPRDWQRLINNNWGFRPKRLNFKLFNIQVKEVTQNDGTTTIANNLTSTIQVFTDSEYQLPYVLGSAHQGCLPPFPADVFMVPQYGYLTLNNGSQAVGRSSFYCLEYFPSQMLRTGNNFTFSYTFEDVPFHSSYAHSQSLDRLMNPLIDQYLYYLNRTQSNSGTLQQSRLLFSQAGPTSMSLQAKNWLPGPCYRQQRLSKQANDNNNSNFPWTAATKYHLNGRDSLVNPGPAMASHKDDEEKFFPMHGTLIFGKQGTNANDADLEHVMITDEEEIRTTNPVATEQYGNVSNNLQNSNTGPTTENVNHQGALPGMVWQDRDVYLQGPIWAKIPHTDGHFHPSPLMGGFGLKHPPPQIMIKNTPVPANPPTNFSAAKFASFITQYSTGQVSVEIEWELQKENSKRWNPEIQYTSNYNKSVNVDFTVDTNGVYSEPRPIGTRYLTRNL

SEQ ID NO: 4134 - protein, 735 aa, Artificial Sequence
  source: /note="Description of Artificial Sequence: Synthetic polypeptide"
MAADGYLPDWLEDTLSEGIRQWWKLKPGPPPPKPAERHQDDSRGLVLPGYKYLGPFNGLDKGEPVNEADAAALEHDKAYDRQLDSGDNPYLKYNHADAEFQERLKEDTSFGGNLGRAVFQAKKRVLEPLGLVEEPVKTAPGKKRPVGHSPAEPDSSSGTGKAGQQPARKRLNFGQTGDADSVPDPQPLGQPPAAPTSLGSTTMATGSGAPMADNNEGADGVGNSSGNWHCDSQWLGDRVITTSTRTWALPTYNNHLYKQISSQSGASNDNHYFGYSTPWGYFDFNRFHCHFSPRDWQRLINNNWGFRPKRLNFKLFNIQVKEVTQNDGTTTIANNLTSTVQVFTDSEYQLPYVLGSAHQGCLPPFPADVFMVPQYGYLTLNNGSQAVGRSSFYCLEYFPSQMLRTGNNFTFSYTFEDVPFHSSYAHSQSLDRLMNPLIDQYLYYLNRTQSNSGTLQQSRLLFSQAGPTSMSLQAKNWLPGPCYRQQRLSKQANDNNNSNFPWTAATKYHLNGRDSLVNPGPAMASHKDDEEKFFPMHGTLIFGKQGTNANDADLEHVMITDEEEIRTTNPVATEQYGNVSNNLQNSNTGPTTENVNHQGALPGMVWQDRDVYLQGPIWAKIPHTDGHFHPSPLMGGFGLKHPPPQIMIKNTPVPANPPTNFSAAKFASFITQYSTGQVSVEIEWELQKENSKRWNPEIQYTSNYNKSVNVDFTVDTNGVYSEPRPIGTRYLTRNL

SEQ ID NO: 4135 - protein, 735 aa, Artificial Sequence
  source: /note="Description of Artificial Sequence: Synthetic polypeptide"
MAADGYLPDWLEDTLSEGIRQWWKLKPGPPPPKPAERHQDDSRGLVLPGYKYLGPFNGLDKGEPVNEADAAALEHDKAYDRQLDSGDNPYLKYNHADAEFQERLKEDTSFGGNLGRAVFQAKKRVLEPLGLVEEPVKTAPGKKRPVEHSPAEPDSSSGTGKAGQQPARKRLNFGQTGDADSVPDPQPLGQPPAAPTSLGSTTMATGSGAPMADNNEGADGVGNSSGNWHCDSQWLGDRVITTSTRTWALPTYNNHLYKQISSQSGASNDNHYFGYSTPWGYFDFNRFHCHFSPRDWQRLINNNWGFRPKRLNFKLFNIQVKEVTQNDGTTTIANNLTSTVQVFTDSEYQLPYVLGSAHQGCLPPFPADVFMVPQYGYLTLNNGSQAVGRSSFYCLEYFPSQMLRTGNNFTFSYTFEDVPFHSSYAHSQSLDRLMNPLIDQYLYYLNRTQSNSGTLQQSRLLFSQAGPTSMSLQAKNWLPGPCYRQQRLSKQANDNNNSNFPWTAATKYHLNGRDSLVNPGPAMASHKDDEEKFFPMHGTLIFGKQGTNANDADLEHVMITDEEEIRTTNPVATEQYGNVSNNLQNSNTGPTTENVNHQGALPGMVWQDRDVYLQGPIWAKIPHTDGHFHPSPLMGGFGLKHPPPQIMIKNTPVPANPPTNFSAAKFASFITQYSTGQVSVEIERELQKENSKRWNPEIQYTSNYNKSVNVDFTVDTNGVYSEPRPIGTRYLTRNL

SEQ ID NO: 4136 - protein, 735 aa, Artificial Sequence
  source: /note="Description of Artificial Sequence: Synthetic polypeptide"
MAADGYLPDWLEDTLSEGIRQWWKLKPGPPPPKPAERHQDDSRGLVLPGYKYLGPFNGLDKGEPVNEADAAALEHDKAYDRQLDSGDNPYLKYNHADAEFQERLKEDTSFGGNLGRAVFQAKKRVLEPLGLVEEPVKTAPGKKRPVEHSPAEPDSSSGTGKAGQQPARKRLNFGQTGDADSVPDPQPLGQPPAAPTSLGSTTMATGSGAPMADNNEGADGVGNSSGNWHCDSQWLGDRVITTSTRTWALPTYNNHLYKQISSQSGASNDNHYFGYSTPWGYFDFNRFHCHFSPRDWQRLINNNWGFRPKRLNFKLFNIQVKEVTQNDGTTTIANNLTSTVQVFTDSEYQLPYVLGSAHQGCLPPFPADVFMVPQYGYLTLNNGSQAVGRSSFYCLEYFPSQMLRTGNNFTFSYTFEDVPFHSSYAHSQSLDRLMNPLIDQYLYYLNRTQSNSGTLQQSRLLFSQAGPTSMSLQAKNWLPGPCYRQQRLSKQANDNNNSNFPWTAATKYHLNGRDSLVNPGPAMASHKDDEEKFFPMHGTLIFGKQGTNANDADLEHVMITDEEEIRTTNPVATEQYGNVSNNLQNSNTGPTTENVNHQGALPGMVWQDRDVYLQGPIWAKIPHTDGHFHPSPLMGGFGLKHPPPQIMIKNTPVPANPPTNFSAAKFASFITQYSTGQVSVEIEWELQKENSKRWNPEIQYTSNYNKSVNVDLTVDTNGVYSEPRPIGTRYLTRNL

SEQ ID NO: 4137 - protein, 735 aa, Artificial Sequence
  source: /note="Description of Artificial Sequence: Synthetic polypeptide"
MAADGYLPDWLEDTLSEGIRQWWKLKPGPPPPKPAERHKDDSRGLVLPGYKYLGPFNGLDKGEPVNEADAAALEHDKAYDRQLDSGDNPYLKYNHADAEFQERLKEDTSFGGNLGRAVFQAKKRVLEPLGLVEEPVKTAPGKKRPVEHSPVEPDSSSGTGKAGQQPARKRLNFGQTGDADSVPDPQPLGQPPAAPTSLGSTTMATGSGAPMADNNEGADGVGNSSGNWHCDSQWLGDRVITTSTRTWALPTYNNHLYKQISSQSGASNDNHYFGHSTPWGYFDFNRFHCHFSPRDWQRLINNNWGFRPKRLNFKLFNIQVKEVTQNDGTTTIANNLTSTVQVFTDSEYQLPYVLGSAHQGCLPPFPADVFMVPQYGYLTLNNGSQAVGRSSFYCLEYFPSQMLRTGNNFTFSYTFEDVPFHSSYAHSQSLDRLMNPLIDQYLYYLNKTQSNSGTLQQSRLLFSQAGPTSMSLQAKNWLPGPCYRQQRLSKQANDNNNSNFPWTAATKYHLNGRDSLVNPGPAMASHKDDEEKFFPMHGTLIFGKQGTNANDADLDNVMITDEEEIRTTNPVATEQYGTVSNNLQNSNTGPTTGTVNHQGALPGMVWQDRDVYLQGPIWAKIPHTDGHFHPSPLMGGFGLKHPPPQIMIKNTPVPANPPTNFSSAKFASFITQYSTGQVSVEIEWELQKENSKRWNPEIQYTSNYNKSVNVDFTVDTNGVYSEPRPIGTRYLTRNL

SEQ ID NO: 4138 - protein, 735 aa, Artificial Sequence
  source: /note="Description of Artificial Sequence: Synthetic polypeptide"
MAADGYLPDWLEDTLSEGIRQWWKLKPGPPPPKPAERHKDDSRGLVLPGYKYLGPFNGLDKGEPVNEADAAALEHDKAYDRQLDSGDNPYLKYNHADAEFQERLKEDTSFGGNLGRAVFQAKKRVLEPLGLVEEPVKTAPGKKRPVEHSPVEPDSSSGTGKAGQQPARKRLNFGQTGDADSVPDPQPLGQPPAAPTSLGSTTMATGSGAPMADNNEGADGVGNSSGNWHCDSQWLGDRVITTSTRTWALPTYNNHLYKQISSQSGAPNDNHYFGHSTPWGYFDFNRFHCHFSPRDWQRLINNNWGFRPKRLNFKLFNIQVKEVTQNDGTTTIANNLTSTVQVFTDSEYQLPYVLGSAHQGCLPPFPADVFMVPQYGYLTLNNGSQAVGRSSFYCLEYFPSQMLRTGNNFTFSYTFEDVPFHSSYAHSQSLDRLMNPLIDQYLYYLNKTQSNSGTLQQSRLLFSQAGPTSMSLQAKNWLPGPCYRQQRLSKQANDNNNSNFPWTAATKYHLNGRDSLVNPGPAMASHKDDEEKFFPMHGTLIFGKQGTNANDADLDNVMITDEEEIRTTNPVATEQYGTVSNNLQNSNTGPTTGTVNHQGALPGMVWQDRDVYLQGPIWAKIPHTDGHFHPSPLMGGFGLKHPPPQIMIKNTPVPANPPTNFSSAKFASFITQYSTGQVSVEIEWELQKENSKRWNPEIQYTSNYNKSVNVDFTVDTNGVYSEPRPIGTRYLTRNL

SEQ ID NO: 4139 - protein, 735 aa, Artificial Sequence
  source: /note="Description of Artificial Sequence: Synthetic polypeptide"
MAADGYLPDWLEDTLSEGIRQWWKLKPGPPPPKPAERHKDDSRGLVLPGYKYLGPFNGLDKGEPVNEADAAALEHDKAYDRQLDSGDNPYLKYNHADAEFQERLKEDTSFGGNLGRAVFQAKKRVLEPLGLVEEPVKTAPGKKRPVEHSPVEPDSSSGTGKAGQQPARKRLNFGQTGDADSVPDPQPLGQPPAAPTSLGSTTMATGSGAPMADNNEGADGVGNSSGNWHCDSQWLGDRVITTSTRTWALPTYNNHLYKQISSQSGASNDNHYFGHSTPWGYFDFNRFHCHFSPRDWQRLINNNWGFRPKRLNFKLFNIQVKEVTQNDGTTTIANNLTSTVQVFTDSEYQLPYVLGSAHQGCLPPFPADVFMVPQYGYLTLNNGSQAVGRSSFYCLEYFPSQMLRTGNNFTFSYTFEDVPFHSSYAHSQSLDRLMNPLIDQYLYYLNKTQSNSGTLQQSRLLFSQAGPTSMSLQAKNWLPGPCYRQQRLSKQANDNNNSNFPWTAATKYHLNGRDSLVNPGPAMASHKDDEEKFFPMHGTLIFGKQGTNANDADLDNVMITDEEEIRTTNPVATEQYGTVSNNLQNSNTGPTTGTVNHQGALPGMVWQDRDVYLQGPIWAKIPHTDGHFHPSPLMGGFGLKHPPPQIMIKNTPVPANPPTNFSSAKFASFITQYSTGQVGVEIEWELQKENSKRWNPEIQYTSNYNKSVNVDFTVDTNGVYSEPRPIGTRYLTRNL

SEQ ID NO: 4140 - protein, 735 aa, Artificial Sequence
  source: /note="Description of Artificial Sequence: Synthetic polypeptide"
MAADGYLPDWLEDTLSEGIRQWWKLKPGPPPPKPAERHKDDSRGLVLPGYKYLGPFNGLDKGEPVNEADAAALEHDKAYDRQLDSGDNPYLKYNHADAEFQERLKEDTSFGGNLGRAVFQAKKRVLEPLGLVEEPVKTAPGKKRPVEHSPVEPDSSSGTGKAGQQPARKRLNFGQTGDADSVPDPQPLGQPPAAPTSLGSTTMATGSGAPMADNNEGADGVGNSSGNWHCDSQWLGDRVITTSTRTWALPTYNNHLYKQISSQSGASNDNHYFGHSTPWGYFDFNRFHCHFSPRDWQRLINNNWGFRPKRLNFKLFNIQVKEVTQNDGTTTIANNLTSTVQVFTDSEYQLPYVLGSAHQGCLPPFPADVFMVPQYGYLTLNNGSQAVGRSSFYCLEYFPSQMLRTGNNFTFSYTFEDVPFHSSYAHSQSLDRLMNPLIDQYLYYLNKTNNQSGTFTQSRLLFSQAGPTSILFKSKNWLPGPCYRQQRLSKRANDNNNSNFPWTAATKYHLNGRDSLVNPGPAMASHKDDEEKFFPQHGTLIFGKQGTKLTDADLDNVMITDEEEIRTTNPVATEQYGTVSNNLQKLNILATTGTVNTQGALPGMVWQDRDVYLQGPIWAKIPHTDGHFHPSPLMGGFGLKHPPPQIMIKNTPVPANPPTNFSSAKFASFITQYSTGQVSVEIEWELQKENSKRWNPEIQYTSNYNKSVNVDFTVDTNGVYSEPRPIGTRYLTRNL

SEQ ID NO: 4141 - protein, 735 aa, Artificial Sequence
  source: /note="Description of Artificial Sequence: Synthetic polypeptide"
MAADGYLPDWLEDTLSEGIRQWWKLKPGPPPPKPAERHKDASRGLVLPGYKYLGPFNGLDKGEPVNEADAAALEHDKAYDRQLDSGDNPYLKYNHADAEFQERLKEDTSFGGNLGRAVFQAKKRVLEPLGLVEEPVKTAPGKKRPVEHSPVEPDSSSGTGKAGQQPARKRLNFGQTGDADSVPDPQPLGQPPAAPTSLGSTTMATGSGAPMADNNEGADGVGNSSGNWHCDSQWLGDRVITTSTRTWALPTYNNHLYKQISSQSGASNDNHYFGYSTPWGYFDFNRFHCHFSPRDWQRLINNNWGFRPKRLNFKLFNIQVKEVTQNDGTTTIANNLTSTVQVFTDSEYQLPYVLGSAHQGCLPPFPADVFMVPQYGYLTLNNGSQAVGRSSFYCLEYFPSQMLRTGNNFTFSYTFEDVPFHSSYAHSQSLDRLMNPLIDQYLYYLNKTNNQSGTFTQSRLLFSQAGPTSILFKSKNWLPGPCYRQQRLSKTANDNNNSNFPWTAATKYHLNGRDSLVNPGPAMASHKDDEEKFFPQHGTLIFGKQGTKLTDADLDNVMITDEEEIRTTNPVATEQYGTVSNNLQKLNILATTGTVNTQGALPGMVWQDRDVYLQGPIWAKIPHTDGHFHPSPLMGGFGLKHPPPQIMIKNTPVPANPPTNFSSAKFASFITQYSTGQVSVEIEWELQKENSKRWNPEIQYTSNYNKSVNVDFTVDTNGVYSEPRPIGTRYLTRNL

SEQ ID NO: 4142 - protein, 735 aa, Artificial Sequence
  source: /note="Description of Artificial Sequence: Synthetic polypeptide"
MAADGYLPDWLEDTLSEGIRQWWKLKPGPPPPKPAERHKDDSRGLVLPGYKYLGPFNGLDKGEPVNEADAAALEHDKAYDRQLDSGDNPYLKYNHADAEFQERLKEDTSFGGNLGRAVFQAKKRVLEPLGLVEEPVKTAPGKKRPVEHSPVEPDSSSGTGKAGQQPARKRLNFGQTGDADSVPDPQPLGQPPAAPTSLGSTTMATGSGAPMADNNEGADGVGNSSGNWHCDSQWLGDRVITTSTRTWALPTYNNHLYKQISSQSGASNDNHYFGHSTPWGYFDFNRFHCHFSPRDWQRLINNNWGFRPKRLNFKLFNIQVKEVTQNDGTTTIANNLTSTVQVFTDSEYQLPYVLGSAHQGCLPPFPADVFMVPQYGYLTLNNGSQAVGRSSFYCLEYFPSQMLRTGNNFTFSYTFEDVPFHSSYAHSQSLDRLMNPLIDQYLYYLNKTNNQSGTFTQSRLLFSQAGPTSILFKSKNWLPGPCYRQQRLSKTANDNNNSNFPWTAATKYHLNGRDSLVNPGPAMASHKDDEEKFFPQHGTLIFGKQGTKLTDADLDNVMITDEEEIRTTNPVATEQYGTVSNNLQKLNILATTGTVNTQGALPGMVWQDRDVYLQGPIWAKIPHTDGHFHPSPLMGGFGLKHPPPQIMIKNTPVPANPPTNFSSAKFASFITQYSTGQVSVEIEWELQKENSKRWNPEIQYTSNYNKSVNVDFTVDTNGVYSEPRPIGTRYLTRNL

SEQ ID NO: 4143 - protein, 735 aa, Artificial Sequence
  source: /note="Description of Artificial Sequence: Synthetic polypeptide"
MAADGYLPDWLEDTLSEGIRQWWKLKPGPPPPKPAERHQDDSRGLVLPGYKYLGPFNGLDKGEPVNEADAAALEHDKAYDRQLDSGDNPYLKYNHADAEFQERLKEDTSFGGNLGRAVFQAKKRVLEPLGLVEEPVKTAPGKKRPVEHSPAEPDSSSGTGKAGQQPARKRLNFGQTGDADSVPDPQPLGQPPAAPTSLGSTTMATGSGAPMADNNEGADGVGNSSGNWHCDSQWLGDGVITTSTRTWALPTYNNHLYKQISSQSGASNDNHYFGYSTPWGYFDFNRFHCHFSPRDWQRLINNNWGFRPKRLNFKLFNIQVKEVTQNDGTTTIANNLTSTVQVFTDSEYQLPYVLGSAHQGCLPPFPADVFMVPQYGYLTLNNGSQAVGRSSFYCLEYFPSQMLRTGNNFTFSYTFEDVPFHSSYAHSQSLDRLMNPLIDQYLYYLNRTQSNSGTLQQSRLLFSQAGPTSMSLQAKNWLPGPCYRQQRLSKQANDNNNSNFPWTAATKYHLNGRDSLVNPGPAMASHKDDEEKFFPMHGTLIFGKQGTNANDADLEHVMITDEEEIRTTNPVATEQYGNVSNNLQNSNTGPTTENVNHQGALPGMVWQDRDVYLQGPIWAKIPHTDGHFHPSPLMGGFGLKHPPPQIMIKNTPVPANPPTNFSAAKFASFITQYSTGQVSVEIEWELQKENSKRWNPEIQYTSNYNKSVNVDFTVDTNGVYSEPRPIGTRYLTRNL

SEQ ID NO: 4144 - protein, 735 aa, Artificial Sequence
  source: /note="Description of Artificial Sequence: Synthetic polypeptide"
MAADGYLPDWLEDTLSEGIRQWWKLKPGPPPPKPAERHQDDSRGLVLPGYKYLGPFNGLDKGEPVNEADAAALEHDKAYDRQLDSGDNPYLKYNHADAEFQERLKEDTSFGGNLGRAVFQAKKRVLEPLGLVEEPVKTAPGKKRPVEHSPAEPDSSSGTGKAGQQPARKRLNFGQTGDADSVPDPQPLGQPPAAPTSLGSTTMATGSGAPMADNNEGADGVGNSSGNWHCDSQWLGDRVITTSTRTWALPTYNNHLYKQISSQSGASNDNHYFGYSTPWGYFDFNRFHCHFSPRDWQRLINNNWGFRPKRLNFKLFNIQVKEVTQNDGTTTIANNLTSTVQAFTDSEYQLPYVLGSAHQGCLPPFPADVFMVPQYGYLTLNNGSQAVGRSSFYCLEYFPSQMLRTGNNFTFSYTFEDVPFHSSYAHSQSLDRLMNPLIDQYLYYLNRTQSNSGTLQQSRLLFSQAGPTSMSLQAKNWLPGPCYRQQRLSKQANDNNNSNFPWTAATKYHLNGRDSLVNPGPAMASHKDDEEKFFPMHGTLIFGKQGTNANDADLEHVMITDEEEIRTTNPVATEQYGNVSNNLQNSNTGPTTENVNHQGALPGMVWQDRDVYLQGPIWAKIPHTDGHFHPSPLMGGFGLKHPPPQIMIKNTPVPANPPTNFSAAKFASFITQYSTGQVSVEIEWELQKENSKRWNPEIQYTSNYNKSVNVDFTVDTNGVYSEPRPIGTRYLTRNL

SEQ ID NO: 4145 - protein, 735 aa, Artificial Sequence
  source: /note="Description of Artificial Sequence: Synthetic polypeptide"
MAADGYLPDWLEDTLSEGIRQWWKLKPGPPPPKPAERHQDDSRGLVLPGYKYLGPFNGLDKGEPVNEADAAALEHDKAYDRQLDSGDNPYLKYNHADAEFQERLKEDTSFGGNLGRAVFQAKKRVLEPLGLVEEPVKTAPGKKRPVEHSPAEPDSSSGTGKAGQQPARKRLNFGQTGDADSVPDPQPLGQPPAAPTSLGSTTMATGSGAPMADNNEGADGVGNSSGNWHCDSQWLGDRVITTSTRTWALPTYNNHLYKQISSQSGASNDNHYFGYSTPWGYFDFNRFHCHFSPRDWQRLINNNWGFRPKRLNFKLFNIQVKEVTQNDGTTTIANNLTSTVQVFTDSEYQLPYVLGSAHQGCLPPFPADVFMVPQYGYLTLNNGSQAVGRSSFYCLEYFPSQMLRTGNNFTFSYTFEDVPFHSSYAHSQSLDRLMNPLIDQYLYYLNRTQSNSGTLQQSRLLFSQAGPTSMSLQAKNWLPGPCYRQQRLSKQANDNNNSNFPWTAATKYHLNGRDSLVNPGPAMASHKDDEEKFFPMHGTLIFGKQGTNANDADLEHVMITDEEEIRTTNPVATEQYGNVSNNLQNSNTGPTTENVNHQGALPGMVWQDRDVYLQGPIWAKIPHTDGHFHPSPLMGGFGLKHPPPQIMIKNTPVPANPPTNFSAAKFASFITQYSTGQVSVEIEWELQKGNSKRWNPEIQYTSNYNKSVNVDFTVDTNGVYSEPRPIGTRYLTRNL

SEQ ID NO: 4146 - protein, 735 aa, Artificial Sequence
  source: /note="Description of Artificial Sequence: Synthetic polypeptide"
MAADGYLPDWLEDTLSEGIRQWWKLKPGPPPPKPAERHQDDSRGLVLPGYKYLGPFNGLDKGEPVNEADAAALEHDKAYDRQLDSGDNPYLKYNHADAEFQERLKEDTSFGGNLGRAVFQAKKRVLEPLGLVEEPVKTAPGKKRPVEHSPAEPDSSSGTGKAGQQPARKRLNFGQTGDADSVPDPQPLGQPPAAPTSLGSTTMATGSGAPMADNNEGADGVGNSSGNWHCDSQWLGDRVITTSTRTWALPTYNNHLYKQISSQSGASNDNHYFGYSTPWGYFDFNRFHCHFSPRDWQRLINNNWGFRPKRLNFKLFNIQVKEVTQNDGTTTIANNLTSTVQVFTDSEYQLPYVLGSAHQGCLPPFPADVFMVPQYGYLTLNNGSQAVGRSSFYCLEYFPSQMLRTGNNFTFSYTFEDVPFHSSYAHSQSLDRLMNPLIDQYLYYLNRTQSNSGTLQQSRLLFSQAGPTSMSLQAKNWLPGPCYRQQRLSKQANDNNNSNFPWTAATKYHLNGRDSLVNPGPAMASHKDDEEKFFPMHGTLIFGKQGTNANDADLEHVMITDEEEIRTTNPVATEQYGNVSNNLQNSNTGPTTENVNHQGALPGMVWQDRDVYLQGPIWAKIPHTDGHFHPSPLMGGFGLKHPPPQIMIKNTPVPANPPTNFSAAKFASFITQYSTGQVSVEIEWGLQKENSKRWNPEIQYTSNYNKSVNVDFTVDTNGVYSEPRPIGTRYLTRNL

SEQ ID NO: 4147 - protein, 735 aa, Artificial Sequence
  source: /note="Description of Artificial Sequence: Synthetic polypeptide"
MAADGYLPDWLEDTLSEGIRQWWKLKPGPPPPKPAERHQDDSRGLVLPGYKYLGPFNGLDKGEPVNEADAAALEHDKAYDRQLDSGDNPYLKYNHADAEFQERLKEDTSFGGNLGRAVFQAKKRVLEPLGLVEEPVKTAPGKKRPVEHSPAEPDSSSGTGKAGQQPARKRLNFGQTGDADSVPDPQPLGQPPAAPTSLGSTTMATGSGAPMADNNEGADGVGNSSGNWHCDSQWLGDRVITTSTRTWALPTYNNHLYKQISSQSGASNDNHYFGYSTPWGYFDFNRFHCHFSPRDWQRLINNNWGFRPKRLNFKLFNIQVKEVTQNDGTTTIANNLTSTVQVFTDSEYQLPYVLGSAHQGCLPPFPADVFMVPQYGYLTLNNGSQAVGRSSFYCLEYFPSQMLRTGNNFTFSYTFEDVPFHSSYAHSQSLDRLMNPLIDQYLYYLNRTRSNSGTLQQSRLLFSQAGPTSMSLQAKNWLPGPCYRQQRLSKQANDNNNSNFPWTAATKYHLNGRDSLVNPGPAMASHKDDEEKFFPMHGTLIFGKQGTNANDADLEHVMITDEEEIRTTNPVATEQYGNVSNNLQNSNTGPTTENVNHQGALPGMVWQDRDVYLQGPIWAKIPHTDGHFHPSPLMGGFGLKHPPPQIMIKNTPVPANPPTNFSAAKFASFITQYSTGQVSVEIEWELQKENSKRWNPEIQYTSNYNKSVNVDFTVDTNGVYSEPRPIGTRYLTRNL

SEQ ID NO: 4148 - protein, 735 aa, Artificial Sequence
  source: /note="Description of Artificial Sequence: Synthetic polypeptide"
MAADGYLPDWLEDTLSEGIRQWWKLKPGPPPPKPAERHQDDSRGLVLPGYKYLGPFNGLDKGEPVNEADAAALEHDKAYDRQLDSGDNPYLKYNHADAEFQERLKEDTSFGGNLGRAVFQAKKRVLEPLGLVEEPVKTAPGKKRPVEHSPAEPDSSSGTGKAGQQPARKRLNFGQTGDADSVPDPQPLGQPPAAPTSLGSTTMATGSGAPMADNNEGADGVGNSSGNWHCDSQWLGDRVITTSTRTWALPTYNNHLYKQISSQSGASNDNHYFGYSTPWGYFDFNRFHCHFSPRDWQRLINNNWGFRPKRLNFKLFNIQVKEVTQNDGTTTIANNLTSTVQVFTDSEYQLPYVLGSAHQGCLPPFPADVFMVPQYGYLTLNNGSQAVGRSSFYCLEYFPSQMLRTGNNFTFSYTFEDVPFHSSYAHSQSLDRLMNPLIDQYLYYLNRTQSNSGTLQQSRLLFSQAGPTSMSLQAKNWLPGPCYRQQRLSKQANDNNNSNFPWTAATKYHLNGRDSLVNPGPAMASHKDDEEKFFPMHGTLIFGKQGTNANDADLEHVMITDEEEIRTTNPVATEQYGNVSNNLQNSNTGPTTENVNHQGALPGMVWQDRGVYLQGPIWAKIPHTDGHFHPSPLMGGFGLKHPPPQIMIKNTPVPANPPTNFSAAKFASFITQYSTGQVSVEIEWELQKENSKRWNPEIQYTSNYNKSVNVDFTVDTNGVYSEPRPIGTRYLTRNL

SEQ ID NO: 4149 - protein, 735 aa, Artificial Sequence
  source: /note="Description of Artificial Sequence: Synthetic polypeptide"
MAADGYLPDWLEDTLSEGIRQWWKLKPGPPPPKPAERHQDDSRGLVLPGYKYLGPFNGLDKGEPVNEADAAALEHDKAYDRQLDSGDNPYLKYNHADAEFQERLKEDTSFGGNLGRAVFQAKKRVLEPLGLVEEPVKTAPGKKRPVEHSPAEPDSSSGTGKAGQQPARKRLNFGQTGDADSVPDPQPLGQPPAAPTSLGSTTMATGSGAPMADNNEGADGVGNSSGNWHCDSQWLGDRVITTSTRTWALPTYNNHLYKQISSQSGASNDNHYFGYSTPWGYFDFNRFHCHFSPRDWQRLINNNWGFRPKRLNFKLFNIQVKEVTQNGGTTTIANNLTSTVQVFTDSEYQLPYVLGSAHQGCLPPFPADVFMVPQYGYLTLNNGSQAVGRSSFYCLEYFPSQMLRTGNNFTFSYTFEDVPFHSSYAHSQSLDRLMNPLIDQYLYYLNRTQSNSGTLQQSRLLFSQAGPTSMSLQAKNWLPGPCYRQQRLSKQANDNNNSNFPWTAATKYHLNGRDSLVNPGPAMASHKDDEEKFFPMHGTLIFGKQGTNANDADLEHVMITDEEEIRTTNPVATEQYGNVSNNLQNSNTGPTTENVNHQGALPGMVWQDRDVYLQGPIWAKIPHTDGHFHPSPLMGGFGLKHPPPQIMIKNTPVPANPPTNFSAAKFASFITQYSTGQVSVEIEWELQKENSKRWNPEIQYTSNYNKSVNVDFTVDTNGVYSEPRPIGTRYLTRNL

SEQ ID NO: 4150 - protein, 735 aa, Artificial Sequence
  source: /note="Description of Artificial Sequence: Synthetic polypeptide"
MAADGYLPDWLEDTLSEGIRQWWKLKPGPPPPKPAERHQDDSRGLVLPGYKYLGPFNGLDKGEPVNEADAAALEHDKAYDRQLDSGDNPYLKYNHADAEFQERLKEDTSFGGNLGRAVFQAKKRVLEPLGLVEEPVKTAPGKKRPVEHSPAEPDSSSGTGKAGQQPARKRLNFGQTGDADSVPDPQPLGQPPAAPTSLGSTTMATGSGAPMADNNEGADGVGNSSGNWHCDSQWLGDRVITTSTRTWALPTYNNHLYKQISSQSGASNDNHYFGYSTPWGYFDFNRFHCHFSPRDWQRLINNNWGFRPKRLNFKLFNIQVKEVTQNDGTTTIANNLTSTVQVFTDSEYQLPYVLGSAHQGCLPPFPADVFMVPQYGYLTLNNGSQAVGRSSFYCLEYFPSQMLRTGNNFTFSYTFEDVPFHSSYAHSQSLDRLMNPLIDQYLYYLNRTQSNSGTLQQSRLLFSQAGPTSMSLQAKNWLPGPCYRQQRLSKQANDNNNSNFPWTAATKYHLNGRDSLVNPGPAMASHKDDEEKFFPMHGTLIFGKQGTNANDADLEHVMITDEEEIRTTNPVATEQYGNVSNNLQNSNTGPTTENVNHQGALPGMVWQDRDVYLQGPIWAKIPHTDGHFHPSPLMGGFGLKHPPPQIMIKNTPVPANPPTNFSAAKFASFITQYSTGQVSVEIEWELRKENSKRWNPEIQYTSNYNKSVNVDFTVDTNGVYSEPRPIGTRYLTRNL

SEQ ID NO: 4151 - protein, 735 aa, Artificial Sequence
  source: /note="Description of Artificial Sequence: Synthetic polypeptide"
MAADGYLPDWLEDTLSEGIRQWWKLKPGPPPPKPAERHQDDSRGLVLPGYKYLGPFNGLDKGEPVNEADAAALEHDKAYDRQLDSGDNPYLKYNHADAEFQERLKEDTSFGGNLGRAVFQAKRRVLEPLGLVEEPVKTAPGKKRPVEHSPAEPDSSSGTGKAGQQPARKRLNFGQTGDADSVPDPQPLGQPPAAPTSLGSTTMATGSGAPMADNNEGADGVGNSSGNWHCDSQWLGDRVITTSTRTWALPTYNNHLYKQISSQSGASNDNHYFGYSTPWGYFDFNRFHCHFSPRDWQRLINNNWGFRPKRLNFKLFNIQVKEVTQNDGTTTIANNLTSTVQVFTDSEYQLPYVLGSAHQGCLPPFPADVFMVPQYGYLTLNNGSQAVGRSSFYCLEYFPSQMLRTGNNFTFSYTFEDVPFHSSYAHSQSLDRLMNPLIDQYLYYLNRTQSNSGTLQQSRLLFSQAGPTSMSLQAKNWLPGPCYRQQRLSKQANDNNNSNFPWTAATKYHLNGRDSLVNPGPAMASHKDDEEKFFPMHGTLIFGKQGTNANDADLEHVMITDEEEIRTTNPVATEQYGNVSNNLQNSNTGPTTENVNHQGALPGMVWQDRDVYLQGPIWAKIPHTDGHFHPSPLMGGFGLKHPPPQIMIKNTPVPANPPTNFSAAKFASFITQYSTGQVSVEIEWELQKENSKRWNPEIQYTSNYNKSVNVDFTVDTNGVYSEPRPIGTRYLTRNL

SEQ ID NO: 4152 - protein, 735 aa, Artificial Sequence
  source: /note="Description of Artificial Sequence: Synthetic polypeptide"
MAADGYLPDWLEDTLSEGIRQWWKLKPGPPPPKPAERHQDDSRGLVLPGYKYLGPFNGLDKGEPVNEADAAALEHDKAYDRQLDSGDNPYLKYNHADAELQERLKEDTSFGGNLGRAVFQAKKRVLEPLGLVEEPVKTAPGKKRPVEHSPAEPDSSSGTGKAGQQPARKRLNFGQTGDADSVPDPQPLGQPPAAPTSLGSTTMATGSGAPMADNNEGADGVGNSSGNWHCDSQWLGDRVITTSTRTWALPTYNNHLYKQISSQSGASNDNHYFGYSTPWGYFDFNRFHCHFSPRDWQRLINNNWGFRPKRLNFKLFNIQVKEVTQNDGTTTIANNLTSTVQVFTDSEYQLPYVLGSAHQGCLPPFPADVFMVPQYGYLTLNNGSQAVGRSSFYCLEYFPSQMLRTGNNFTFSYTFEDVPFHSSYAHSQSLDRLMNPLIDQYLYYLNRTQSNSGTLQQSRLLFSQAGPTSMSLQAKNWLPGPCYRQQRLSKQANDNNNSNFPWTAATKYHLNGRDSLVNPGPAMASHKDDEEKFFPMHGTLIFGKQGTNANDADLEHVMITDEEEIRTTNPVATEQYGNVSNNLQNSNTGPTTENVNHQGALPGMVWQDRDVYLQGPIWAKIPHTDGHFHPSPLMGGFGLKHPPPQIMIKNTPVPANPPTNFSAAKFASFITQYSTGQVSVEIEWELQKENSKRWNPEIQYTSNYNKSVNVDFTVDTNGVYSEPRPIGTRYLTRNL

SEQ ID NO: 4153 - protein, 735 aa, Artificial Sequence
  source: /note="Description of Artificial Sequence: Synthetic polypeptide"
MAADGYLPDWLEDTLSEGIRQWWKLKPGPPPPKPAERHQDDSRGLVLPGYKYLGPFNGLDKGEPVNEADAAALEHDKAYDRQLDSGDNPYLKYNHADAEFQERLKEDTSFGGNLGRAVFQAKKRVLEPLGLVEEPVKTAPGKKRPVEHSPAEPDSSSGTGKAGQQPARKRLNFGQTGDADSVPDPQPLGQPPAAPTSLGSTTMATGSGAPMADNNEGADGVGNSSGNWHCDSQWLGGRVITTSTRTWALPTYNNHLYKQISSQSGASNDNHYFGYSTPWGYFDFNRFHCHFSPRDWQRLINNNWGFRPKRLNFKLFNIQVKEVTQNDGTTTIANNLTSTVQVFTDSEYQLPYVLGSAHQGCLPPFPADVFMVPQYGYLTLNNGSQAVGRSSFYCLEYFPSQMLRTGNNFTFSYTFEDVPFHSSYAHSQSLDRLMNPLIDQYLYYLNRTQSNSGTLQQSRLLFSQAGPTSMSLQAKNWLPGPCYRQQRLSKQANDNNNSNFPWTAATKYHLNGRDSLVNPGPAMASHKDDEEKFFPMHGTLIFGKQGTNANDADLEHVMITDEEEIRTTNPVATEQYGNVSNNLQNSNTGPTTENVNHQGALPGMVWQDRDVYLQGPIWAKIPHTDGHFHPSPLMGGFGLKHPPPQIMIKNTPVPANPPTNFSAAKFASFITQYSTGQVSVEIEWELQKENSKRWNPEIQYTSNYNKSVNVDFTVDTNGVYSEPRPIGTRYLTRNL

SEQ ID NO: 4154 - protein, 735 aa, Artificial Sequence
  source: /note="Description of Artificial Sequence: Synthetic polypeptide"
MAADGYLPDWLEDTLSEGIRQWWKLKPGPPPPKPAERHQDDSRGLVLPGYKYLGPFNGLDKGEPVNEADAAALEHDKAYDRQLDSGDNPYLKYNHADAEFQERLKEDTSFGGNLGRAVFQAKKRVLEPLGLVEEPVKTAPGKKRPVEHSPAEPDSSSGTGKAGQQPARKRLNFGQTGDADSVPDPQPLGQPPAAPTSLGSTTMATGSGAPMADNNEGADGVGNSSGNWHCDSQWLGDRVITTSTRTWALPTYNNHLYKQISSQSGASNDNHYFGYSTPWGYFDFNRFHCHFSPRDWQRLINNNWGFRPKRLNFKLFNIQVKEVTQNDGTTTIANNLTSTVQVFTDSEYQLPYVLGSAHQGCLPPLPADVFMVPQYGYLTLNNGSQAVGRSSFYCLEYFPSQMLRTGNNFTFSYTFEDVPFHSSYAHSQSLDRLMNPLIDQYLYYLNRTQSNSGTLQQSRLLFSQAGPTSMSLQAKNWLPGPCYRQQRLSKQANDNNNSNFPWTAATKYHLNGRDSLVNPGPAMASHKDDEEKFFPMHGTLIFGKQGTNANDADLEHVMITDEEEIRTTNPVATEQYGNVSNNLQNSNTGPTTENVNHQGALPGMVWQDRDVYLQGPIWAKIPHTDGHFHPSPLMGGFGLKHPPPQIMIKNTPVPANPPTNFSAAKFASFITQYSTGQVSVEIEWELQKENSKRWNPEIQYTSNYNKSVNVDFTVDTNGVYSEPRPIGTRYLTRNL

SEQ ID NO: 4155 - protein, 735 aa, Artificial Sequence
  source: /note="Description of Artificial Sequence: Synthetic polypeptide"
MAADGYLPDWLEDTLSEGIRQWWKLKPGPPPPKPAERHQDDSRGLVLPGYKYLGPFNGLDKGEPVNEADAAALEHDKAYDRQLDSGDNPYLKYNHADAEFQERLKEDTSFGGNLGRAVFQAKKRVLEPLGLVEEPVKTAPGKKRPVEHSPAEPDSSSGTGKAGQQPARKRLNFGQTGDADSVPDPQPLGQPPAAPTSLGSTAMATGSGAPMADNNEGADGVGNSSGNWHCDSQWLGDRVITTSTRTWALPTYNNHLYKQISSQSGASNDNHYFGYSTPWGYFDFNRFHCHFSPRDWQRLINNNWGFRPKRLNFKLFNIQVKEVTQNDGTTTIANNLTSTVQVFTDSEYQLPYVLGSAHQGCLPPFPADVFMVPQYGYLTLNNGSQAVGRSSFYCLEYFPSQMLRTGNNFTFSYTFEDVPFHSSYAHSQSLDRLMNPLIDQYLYYLNRTQSNSGTLQQSRLLFSQAGPTSMSLQAKNWLPGPCYRQQRLSKQANDNNNSNFPWTAATKYHLNGRDSLVNPGPAMASHKDDEEKFFPMHGTLIFGKQGTNANDADLEHVMITDEEEIRTTNPVATEQYGNVSNNLQNSNTGPTTENVNHQGALPGMVWQDRDVYLQGPIWAKIPHTDGHFHPSPLMGGFGLKHPPPQIMIKNTPVPANPPTNFSAAKFASFITQYSTGQVSVEIEWELQKENSKRWNPEIQYTSNYNKSVNVDFTVDTNGVYSEPRPIGTRYLTRNL

SEQ ID NO: 4156 - protein, 735 aa, Artificial Sequence
  source: /note="Description of Artificial Sequence: Synthetic polypeptide"
MAADGYLPDWLEDTLSEGIRQWWKLKPGPPPPKPAERHQDDSRGLVLPGYKYLGPFNGLDKGEPVNEADAAALEHDKAYDRQLDSGDNPYLKYNHADAEFQERLKEDTSFGGNLGRAVFQAKKRVLEPLGLVEEPVKTAPGKKRPVEHSPAEPDSSSGTGKAGQQPARKRLNFGQTGDADSVPDPQPLGQPPAAPTSLGSTTMATGSGAPMADNNEGADGVGNSSGNWHCDSQWLGDRVITTSTRTWALPTYNNHLYKQISSQSGASNDNHYFGYSTPWGYFDFNRFHCHFSPRDWQRLINNNWGFRPKRLNFKLFNIQVKEVTQNDGTTTIANNLTSTVQVFTDSEYQLPYVLGSAHQGCLPPFPADVFMVPQYGYLTLNNGSQAVGRSSFYCLEYFPSQMLRTGNNFTFSYTFEDVPFHSSYAHSQSLDRLMNPLIDQYLYYLNRTQSNSGTLQQSRLLFSQAGPTSMSLQAKNWLPGPCYRQQRLSRQANDNNNSNFPWTAATKYHLNGRDSLVNPGPAMASHKDDEEKFFPMHGTLIFGKQGTNANDADLEHVMITDEEEIRTTNPVATEQYGNVSNNLQNSNTGPTTENVNHQGALPGMVWQDRDVYLQGPIWAKIPHTDGHFHPSPLMGGFGLKHPPPQIMIKNTPVPANPPTNFSAAKFASFITQYSTGQVSVEIEWELQKENSKRWNPEIQYTSNYNKSVNVDFTVDTNGVYSEPRPIGTRYLTRNL

SEQ ID NO: 4157 - protein, 735 aa, Artificial Sequence
  source: /note="Description of Artificial Sequence: Synthetic polypeptide"
MAADGYLPDWLEDTLSEGIRQWWKLKPGPPPPKPAERHQDDSRGLVLPGYKYLGPFNGLDKGEPVNEADAAALEHDKAYDRQLGSGDNPYLKYNHADAEFQERLKEDTSFGGNLGRAVFQAKKRVLEPLGLVEEPVKTAPGKKRPVEHSPAEPDSSSGTGKAGQQPARKRLNFGQTGDADSVPDPQPLGQPPAAPTSLGSTTMATGSGAPMADNNEGADGVGNSSGNWHCDSQWLGDRVITTSTRTWALPTYNNHLYKQISSQSGASNDNHYFGYSTPWGYFDFNRFHCHFSPRDWQRLINNNWGFRPKRLNFKLFNIQVKEVTQNDGTTTIANNLTSTVQVFTDSEYQLPYVLGSAHQGCLPPFPADVFMVPQYGYLTLNNGSQAVGRSSFYCLEYFPSQMLRTGNNFTFSYTFEDVPFHSSYAHSQSLDRLMNPLIDQYLYYLNRTQSNSGTLQQSRLLFSQAGPTSMSLQAKNWLPGPCYRQQRLSKQANDNNNSNFPWTAATKYHLNGRDSLVNPGPAMASHKDDEEKFFPMHGTLIFGKQGTNANDADLEHVMITDEEEIRTTNPVATEQYGNVSNNLQNSNTGPTTENVNHQGALPGMVWQDRDVYLQGPIWAKIPHTDGHFHPSPLMGGFGLKHPPPQIMIKNTPVPANPPTNFSAAKFASFITQYSTGQVSVEIEWELQKENSKRWNPEIQYTSNYNKSVNVDFTVDTNGVYSEPRPIGTRYLTRNL

SEQ ID NO: 4158 - protein, 735 aa, Artificial Sequence
  source: /note="Description of Artificial Sequence: Synthetic polypeptide"
MAADGYLPDWLEDTLSEGIRQWWKLKPGPPPPKPAERHQDDSRGLVLPGYKYLGPFNGLDKGEPVNEADAAALEHDKAYDRQLDSGDNPYLKYNHADAEFQERLKEDTSFGGNLGRAVFQAKKRVLEPLGLVEEPVKTAPGKKRPVEHSPAEPDSSSGTGKAGQQPARKRLNFGQTGDADSVPDPQPLGQPPAAPTSLGSTTMATGSGAPMADNNEGADGVGNSSGNWHCDSQWLGDRVITTSTRTWALPTYNNHLYKQISSQSGASNDNHYFGYSTPWGYFDFNRFHCHFSPRDWQRLINNNWGFRPKRLNFKLFNIQVKEVTQNDGTTTIANNLTSTVQVFTDSEYQLPYVLGSAHQGCLPPFPADVFMVPQYGYLTLNNGSQAVGRSSFYCLEYFPSQMLRTGNNFTFSYTFEDVPFHSSYAHSQSLDRLMNPLIDQYLHYLNRTQSNSGTLQQSRLLFSQAGPTSMSLQAKNWLPGPCYRQQRLSKQANDNNNSNFPWTAATKYHLNGRDSLVNPGPAMASHKDDEEKFFPMHGTLIFGKQGTNANDADLEHVMITDEEEIRTTNPVATEQYGNVSNNLQNSNTGPTTENVNHQGALPGMVWQDRDVYLQGPIWAKIPHTDGHFHPSPLMGGFGLKHPPPQIMIKNTPVPANPPTNFSAAKFASFITQYSTGQVSVEIEWELQKENSKRWNPEIQYTSNYNKSVNVDFTVDTNGVYSEPRPIGTRYLTRNL

SEQ ID NO: 4159 - protein, 735 aa, Artificial Sequence
  source: /note="Description of Artificial Sequence: Synthetic polypeptide"
MAADGYLPDWLEDTLSEGIRQWWKLKPGPPPPKPAERHQDDSRGLVLPGYKYLGPFNGLDKGEPVNEADAAALEHDKAYDRQLDSGDNPYLKYNHADAEFQERLKEDTSFGGNLGRAVFQAKKRVLEPLGLVEEPVKTAPGKKRPVEHPPAEPDSSSGTGKAGQQPARKRLNFGQTGDADSVPDPQPLGQPPAAPTSLGSTTMATGSGAPMADNNEGADGVGNSSGNWHCDSQWLGDRVITTSTRTWALPTYNNHLYKQISSQSGASNDNHYFGYSTPWGYFDFNRFHCHFSPRDWQRLINNNWGFRPKRLNFKLFNIQVKEVTQNDGTTTIANNLTSTVQVFTDSEYQLPYVLGSAHQGCLPPFPADVFMVPQYGYLTLNNGSQAVGRSSFYCLEYFPSQMLRTGNNFTFSYTFEDVPFHSSYAHSQSLDRLMNPLIDQYLYYLNRTQSNSGTLQQSRLLFSQAGPTSMSLQAKNWLPGPCYRQQRLSKQANDNNNSNFPWTAATKYHLNGRDSLVNPGPAMASHKDDEEKFFPMHGTLIFGKQGTNANDADLEHVMITDEEEIRTTNPVATEQYGNVSNNLQNSNTGPTTENVNHQGALPGMVWQDRDVYLQGPIWAKIPHTDGHFHPSPLMGGFGLKHPPPQIMIKNTPVPANPPTNFSAAKFASFITQYSTGQVSVEIEWELQKENSKRWNPEIQYTSNYNKSVNVDFTVDTNGVYSEPRPIGTRYLTRNL

SEQ ID NO: 4160 - protein, 735 aa, Artificial Sequence
  source: /note="Description of Artificial Sequence: Synthetic polypeptide"
MAADGYLPDWLEDTLSEGIRQWWKLKPGPPPPKPAERHQDDSRGLVLPGYKYLGPFNGLDKGEPVNEADAAALEHDKAYDRQLDSGDNPYLKYNHADAEFQERLKEDTSFGGNLGRAVFQAKKRVLEPLGLVEEPVKTAPGKKRPVEHSPAEPDSSSGTGKAGQQPARKRLNFGQTGDADSVPDPQPLGQPPAAPTSLGSTTMATGSGAPMADNNEGADGVGNSSGNWHCDSQWLGDRVITTSTRTWALPTYNNHLYKQISSQSGASNDNHYFGYSTPWGYFDFNRFHCHFSPRDWQRLINNNWGFRPKRLNFKLFNIQVKEVTQNDGTTTIANNLTSTVQVFTDSEYQLPYVLGSAHQGCLPPFPADVFMVPQYGYLTLNNGSQAVGRSSFYCLEYFPSQMLRTGNNFTFSYTFEDVPFHSSYAHSQSLDRLMNPLIDQYLYYLNRTQSNSGTLQQSRLLFSQAGPTSMSLQAKNWLPGPCYRQQRLSKQANDNNNSNFPWTAATKYHLNGRDSLVNPGPAMASHKDDEEKFFPMHGTLIFGKQGTNANDADLEHVMITDEEEIRTTNPVATEQYGNVSNNLQNSNTGPTTENVNHQGALPGMVWQDRDVYLQGPIWAKIPHTDGHFHPSPLMGGFGLKHPPPQIMIKNTPVPANPPTNFSAAKFASFITQYSTGQVSVEIEWELQKENSKRWNPEIQYTSNYNKSVNVDFTADTNGVYSEPRPIGTRYLTRNL

SEQ ID NO: 4161 - protein, 735 aa, Artificial Sequence
  source: /note="Description of Artificial Sequence: Synthetic polypeptide"
MAADGYLPDWLEDTLSEGIRQWWKLKPGPPPPKPAERHQDDSRGLVLPGYKYLGPFNGLDKGEPVNEADAAALEHDKAYDRQLDSGDNPYLKYNHADAEFQERLKEDTSFGGNLGRAVFQAKKRVLEPLGLVEEPVKTAPGKKRPVEHSPAEPDSSSGTGKAGQQPARKRLNFGQTGDADSVPDPQPLGQPPAAPTSLGSTTMATGSGAPMADNNEGADGVGNSSGNWHCDSQWLGDRVITTSTRTWALPTYNNHLYKQISSQSGASNDNHYFGYSTPWGYFDFNRFHCHFSPRDWQRLINNNWGFRPKRLNFKLFNIQVKEVTQNDGTTTIANNLTSTVQVFTDSEYQLPYVLGSAHQGCLPPFPADVFMVPQYGYLTLNNGSQAVGRSSFYCLEYFPSQMLRTGNNFTFSYTFEDVPFHSSYAHSQSLDRLMNPLIDQYLYYLNRTQSNSGTLRQSRLLFSQAGPTSMSLQAKNWLPGPCYRQQRLSKQANDNNNSNFPWTAATKYHLNGRDSLVNPGPAMASHKDDEEKFFPMHGTLIFGKQGTNANDADLEHVMITDEEEIRTTNPVATEQYGNVSNNLQNSNTGPTTENVNHQGALPGMVWQDRDVYLQGPIWAKIPHTDGHFHPSPLMGGFGLKHPPPQIMIKNTPVPANPPTNFSAAKFASFITQYSTGQVSVEIEWELQKENSKRWNPEIQYTSNYNKSVNVDFTVDTNGVYSEPRPIGTRYLTRNL

SEQ ID NO: 4162 - protein, 735 aa, Artificial Sequence
  source: /note="Description of Artificial Sequence: Synthetic polypeptide"
MAADGYLPDWLEDTLSEGIRQWWKLKPGPPPPKPAERHQDDSRGLVLPGYKYLGPFNGLDKGEPVNEADAAALEHDKAYDRQLDSGDNPYLKYNHADAEFQERLKEDTSFGGNLGRAVFQAKKRVLEPLGLVEEPVKTAPGKKRPVEHSPAEPDSSSGTGKAGQQPARKRLNFGQTGDADSVPDPQPLGQPPAAPTSLGSTTMATGSGAPMADNNEGADGVGNSSGNWHCDSQWLGDRVITTSTRTWALPTYNNHLYKQISSQSGASNDNHYFGYSTPWGYFDFNRFHCHFSPRDWQRLINNNWGFRPKRLNFKLFNIQVKEVTQNDGTTTIANNLTSTVQVFTDSEYQLPYVLGSAHQGCLPPFPADVFMVPQYGYLTLNNGSQAVGRSSFYCLEYFPSQMLRTGNNFTFSYTFEDVPFHSSYAHSQSLDRLMNPLIDQYLYYLNRTQSNSGTLQQSRLLFSQAGPTSMSLQAKNWLPGPCYRQQRLSKQANDNNNSNFPWTAATKYHLNGRDSLVNPGPAMASHKDDEEKFFPMHGTLIFGKQGTNANDADLEHVMITDEEEIRTTNPVATEQYGNVSNNLQNSNTGPTTENVNHQGALPGMVWQDRDVYLQGPIWAKIPHTDGHFHPSPLMGGFGLKHPPPQIMIKNTPVPANPPTNFSAAKFASFITQYSTGRVSVEIEWELQKENSKRWNPEIQYTSNYNKSVNVDFTVDTNGVYSEPRPIGTRYLTRNL

SEQ ID NO: 4163 - protein, 735 aa, Artificial Sequence
  source: /note="Description of Artificial Sequence: Synthetic polypeptide"
MAADGYLPDWLEDTLSEGIRQWWKLKPGPPPPKPAERHQDDSRGLVLPGYKYLGPFNGLDKGEPVNEADAAALEHDKAYDRQLDSGDNPYLKYNHADAEFQERLKEDTSFGGNLGRAVFRAKKRVLEPLGLVEEPVKTAPGKKRPVEHSPAEPDSSSGTGKAGQQPARKRLNFGQTGDADSVPDPQPLGQPPAAPTSLGSTTMATGSGAPMADNNEGADGVGNSSGNWHCDSQWLGDRVITTSTRTWALPTYNNHLYKQISSQSGASNDNHYFGYSTPWGYFDFNRFHCHFSPRDWQRLINNNWGFRPKRLNFKLFNIQVKEVTQNDGTTTIANNLTSTVQVFTDSEYQLPYVLGSAHQGCLPPFPADVFMVPQYGYLTLNNGSQAVGRSSFYCLEYFPSQMLRTGNNFTFSYTFEDVPFHSSYAHSQSLDRLMNPLIDQYLYYLNRTQSNSGTLQQSRLLFSQAGPTSMSLQAKNWLPGPCYRQQRLSKQANDNNNSNFPWTAATKYHLNGRDSLVNPGPAMASHKDDEEKFFPMHGTLIFGKQGTNANDADLEHVMITDEEEIRTTNPVATEQYGNVSNNLQNSNTGPTTENVNHQGALPGMVWQDRDVYLQGPIWAKIPHTDGHFHPSPLMGGFGLKHPPPQIMIKNTPVPANPPTNFSAAKFASFITQYSTGQVSVEIEWELQKENSKRWNPEIQYTSNYNKSVNVDFTVDTNGVYSEPRPIGTRYLTRNL

SEQ ID NO: 4164 - protein, 735 aa, Artificial Sequence
  source: /note="Description of Artificial Sequence: Synthetic polypeptide"
MAADGYLPDWLEDTLSEGIRQWWKPKPGPPPPKPAERHQDDSRGLVLPGYKYLGPFNGLDKGEPVNEADAAALEHDKAYDRQLDSGDNPYLKYNHADAEFQERLKEDTSFGGNLGRAVFQAKKRVLEPLGLVEEPVKTAPGKKRPVEHSPAEPDSSSGTGKAGQQPARKRLNFGQTGDADSVPDPQPLGQPPAAPTSLGSTTMATGSGAPMADNNEGADGVGNSSGNWHCDSQWLGDRVITTSTRTWALPTYNNHLYKQISSQSGASNDNHYFGYSTPWGYFDFNRFHCHFSPRDWQRLINNNWGFRPKRLNFKLFNIQVKEVTQNDGTTTIANNLTSTVQVFTDSEYQLPYVLGSAHQGCLPPFPADVFMVPQYGYLTLNNGSQAVGRSSFYCLEYFPSQMLRTGNNFTFSYTFEDVPFHSSYAHSQSLDRLMNPLIDQYLYYLNRTQSNSGTLQQSRLLFSQAGPTSMSLQAKNWLPGPCYRQQRLSKQANDNNNSNFPWTAATKYHLNGRDSLVNPGPAMASHKDDEEKFFPMHGTLIFGKQGTNANDADLEHVMITDEEEIRTTNPVATEQYGNVSNNLQNSNTGPTTENVNHQGALPGMVWQDRDVYLQGPIWAKIPHTDGHFHPSPLMGGFGLKHPPPQIMIKNTPVPANPPTNFSAAKFASFITQYSTGQVSVEIEWELQKENSKRWNPEIQYTSNYNKSVNVDFTVDTNGVYSEPRPIGTRYLTRNL

SEQ ID NO: 4165 - protein, 735 aa, Artificial Sequence
  source: /note="Description of Artificial Sequence: Synthetic polypeptide"
MAADGYLPDWLEDTLSEGIRQWWKLKPGPPPPKPAERHQDDSRGLVLPGYKYLGPFNGLDKGEPVNEADAAALEHDKAYDRQLDSGDNPYLKYNHADAEFQERLKEDTSFGGNLGRAVFQAKKRVLEPLGLVEEPVKTAPGKKRPVEHSPAEPDSSSGTGKAGQQPARKRLNFGQTGDADSVPDPQPLGQPPAAPTSLGSTTMATGSGAPMADNNEGADGVGNSSGNWHCDSQWLGDRVITTSTRTWALPTYNNHLYKQISSQSGASNDNHYFGYSTPWGYFDFNRFHCHFSPRDWQRLINNNWGFRPKRLNFKLFNIQVKEVTQNDGTTTIANNLTSTVQVFTDSEYQLPYVLGSAHQGCLPPFPADVFMVPQYGYLTLNNGSQAVGRSSFYCLEYFPSQMLRTGNNFTFSYTFEDVPFHSSYAHSQSLDRLMNPLIDQYLYYLNRTQSNSGTLQQSRLLFSQAGPTSMSLQAKNWLPGPCYRQQRLSKQANDNNNSNFPWTAATKYHLNGRDSLVNPGPAMASHKDDEEKFFPMHGTLIFGKQGTNANDADLEHVMITDEEEIRTTNPVATEQYGNVSNNLQNSNTGPTTENANHQGALPGMVWQDRDVYLQGPIWAKIPHTDGHFHPSPLMGGFGLKHPPPQIMIKNTPVPANPPTNFSAAKFASFITQYSTGQVSVEIEWELQKENSKRWNPEIQYTSNYNKSVNVDFTVDTNGVYSEPRPIGTRYLTRNL

SEQ ID NO: 4166 - protein, 735 aa, Artificial Sequence
  source: /note="Description of Artificial Sequence: Synthetic polypeptide"
MAADGYLPDWLEDTPSEGIRQWWKLKPGPPPPKPAERHQDDSRGLVLPGYKYLGPFNGLDKGEPVNEADAAALEHDKAYDRQLDSGDNPYLKYNHADAEFQERLKEDTSFGGNLGRAVFQAKKRVLEPLGLVEEPVKTAPGKKRPVEHSPAEPDSSSGTGKAGQQPARKRLNFGQTGDADSVPDPQPLGQPPAAPTSLGSTTMATGSGAPMADNNEGADGVGNSSGNWHCDSQWLGDRVITTSTRTWALPTYNNHLYKQISSQSGASNDNHYFGYSTPWGYFDFNRFHCHFSPRDWQRLINNNWGFRPKRLNFKLFNIQVKEVTQNDGTTTIANNLTSTVQVFTDSEYQLPYVLGSAHQGCLPPFPADVFMVPQYGYLTLNNGSQAVGRSSFYCLEYFPSQMLRTGNNFTFSYTFEDVPFHSSYAHSQSLDRLMNPLIDQYLYYLNRTQSNSGTLQQSRLLFSQAGPTSMSLQAKNWLPGPCYRQQRLSKQANDNNNSNFPWTAATKYHLNGRDSLVNPGPAMASHKDDEEKFFPMHGTLIFGKQGTNANDADLEHVMITDEEEIRTTNPVATEQYGNVSNNLQNSNTGPTTENVNHQGALPGMVWQDRDVYLQGPIWAKIPHTDGHFHPSPLMGGFGLKHPPPQIMIKNTPVPANPPTNFSAAKFASFITQYSTGQVSVEIEWELQKENSKRWNPEIQYTSNYNKSVNVDFTVDTNGVYSEPRPIGTRYLTRNL

SEQ ID NO: 4167 - protein, 735 aa, Artificial Sequence
  source: /note="Description of Artificial Sequence: Synthetic polypeptide"
MAADGYLPDWLEDTLSEGIRQWWKLKPGPPPPKPAERHQDDSRGLVLPGYKYLGPFNGLDKGEPVNEADAAALEHDKAYDRQLDSGDNPYLKYNHADAEFQERLKEDTSFGGNLGRAVFQAKKRVLEPLGLVEEPVKTAPGKKRPVEHSPAEPDSSSGTGKAGQQPARKRLNFGQTGDADSVPDPQPLGQPPAAPTSLGSTTMATGSGAPMADNNEGADGVGNSSGNWHCDSQWLGDRVITTSTRTWALPTYNNHLYKQISSQSGASNDNHYFGYSTPWGYFDFNRFHCHFSPRDWQRLINNNWGFRPKRLNFRLFNIQVKEVTQNDGTTTIANNLTSTVQVFTDSEYQLPYVLGSAHQGCLPPFPADVFMVPQYGYLTLNNGSQAVGRSSFYCLEYFPSQMLRTGNNFTFSYTFEDVPFHSSYAHSQSLDRLMNPLIDQYLYYLNRTQSNSGTLQQSRLLFSQAGPTSMSLQAKNWLPGPCYRQQRLSKQANDNNNSNFPWTAATKYHLNGRDSLVNPGPAMASHKDDEEKFFPMHGTLIFGKQGTNANDADLEHVMITDEEEIRTTNPVATEQYGNVSNNLQNSNTGPTTENVNHQGALPGMVWQDRDVYLQGPIWAKIPHTDGHFHPSPLMGGFGLKHPPPQIMIKNTPVPANPPTNFSAAKFASFITQYSTGQVSVEIEWELQKENSKRWNPEIQYTSNYNKSVNVDFTVDTNGVYSEPRPIGTRYLTRNL

SEQ ID NO: 4168 - protein, 735 aa, Artificial Sequence
  source: /note="Description of Artificial Sequence: Synthetic polypeptide"
MAADGYLPDWLEDTLSEGIRQWWKLKPGPPPPKPAERHQDDSRGLVLPGYKYLGPFNGLDKGEPVNEADAAALEHDKAYDRQLDSGDNPYLKYNHADAEFQERLKEDTSFGGNLGRAVFQAKKRVLEPLGLVEEPVKTAPGKKRPVEHSPAEPDSSSGTGKAGQQPARKRLNFGQAGDADSVPDPQPLGQPPAAPTSLGSTTMATGSGAPMADNNEGADGVGNSSGNWHCDSQWLGDRVITTSTRTWALPTYNNHLYKQISSQSGASNDNHYFGYSTPWGYFDFNRFHCHFSPRDWQRLINNNWGFRPKRLNFKLFNIQVKEVTQNDGTTTIANNLTSTVQVFTDSEYQLPYVLGSAHQGCLPPFPADVFMVPQYGYLTLNNGSQAVGRSSFYCLEYFPSQMLRTGNNFTFSYTFEDVPFHSSYAHSQSLDRLMNPLIDQYLYYLNRTQSNSGTLQQSRLLFSQAGPTSMSLQAKNWLPGPCYRQQRLSKQANDNNNSNFPWTAATKYHLNGRDSLVNPGPAMASHKDDEEKFFPMHGTLIFGKQGTNANDADLEHVMITDEEEIRTTNPVATEQYGNVSNNLQNSNTGPTTENVNHQGALPGMVWQDRDVYLQGPIWAKIPHTDGHFHPSPLMGGFGLKHPPPQIMIKNTPVPANPPTNFSAAKFASFITQYSTGQVSVEIEWELQKENSKRWNPEIQYTSNYNKSVNVDFTVDTNGVYSEPRPIGTRYLTRNL

SEQ ID NO: 4169 - protein, 735 aa, Artificial Sequence
  source: /note="Description of Artificial Sequence: Synthetic polypeptide"
MAADGYLPDWLEDTLSEGIRQWWKLKPGPPPPKPAERHQDDSRGLVLPGYKYLGPFNGLDKGEPVNEADAAALEHDKAYDRQLDSGDNPYLKYNHADAEFQERLKEDTSFGGNLGRAVFQAKKRVLEPLGLVEEPVKTAPGKKRPVEHSPAEPDSSSGTGKAGQQPARKRLNFGQTGDADSVPDPQPLGQPPAAPTSLGSTTVATGSGAPMADNNEGADGVGNSSGNWHCDSQWLGDRVITTSTRTWALPTYNNHLYKQISSQSGASNDNHYFGYSTPWGYFDFNRFHCHFSPRDWQRLINNNWGFRPKRLNFKLFNIQVKEVTQNDGTTTIANNLTSTVQVFTDSEYQLPYVLGSAHQGCLPPFPADVFMVPQYGYLTLNNGSQAVGRSSFYCLEYFPSQMLRTGNNFTFSYTFEDVPFHSSYAHSQSLDRLMNPLIDQYLYYLNRTQSNSGTLQQSRLLFSQAGPTSMSLQAKNWLPGPCYRQQRLSKQANDNNNSNFPWTAATKYHLNGRDSLVNPGPAMASHKDDEEKFFPMHGTLIFGKQGTNANDADLEHVMITDEEEIRTTNPVATEQYGNVSNNLQNSNTGPTTENVNHQGALPGMVWQDRDVYLQGPIWAKIPHTDGHFHPSPLMGGFGLKHPPPQIMIKNTPVPANPPTNFSAAKFASFITQYSTGQVSVEIEWELQKENSKRWNPEIQYTSNYNKSVNVDFTVDTNGVYSEPRPIGTRYLTRNL

SEQ ID NO: 4170 - protein, 735 aa, Artificial Sequence
  source: /note="Description of Artificial Sequence: Synthetic polypeptide"
MAADGYLPDWLEDTLSEGIRQWWKLKPGPPPPKPAERHQDDSRGLVLPGYKYLGPFNGLDKGEPVNEADAAALEHDKAYDRQLDSGDNPYLKYNHADAEFQERLKEDTSFGGNLGRAVFQAKKRVLEPLGLVEEPVKTAPGKKRPVEHSPAEPDSSSGTGKAGQQPARKRLNFGQTGDADSVPDPQPLGQPPAAPTSLGSTTMATGSGAPMADNNEGADGVGNSSGNWHCDSQWLGDRVITTSTRTWALPTYNNHLYKQISSQSGASNDNHYFGYSTPWGYFDFNRFHCHFSPRDWQRLINNNWGFRPKRLNFKLFNIQVKEVTQNDGTTTIANNLTSTVQVFTDSEYQLPYVLGSAHQGCLPPFPADVFMVPQYGYLTLNNGSQAVGRSSFYCLEYFPSQMLRTGNNFTFSYTFEDVPFHSSYAHSQSLDRLMNPLIDQYLYYLNRTQSNSGTLQQSRLLFSQAGPTSMSLQAKNWLPGPCYRQQRLSKQANDNNNSNFPWTAATKYHLNGRDSLVNPGPAMASHKGDEEKFFPMHGTLIFGKQGTNANDADLEHVMITDEEEIRTTNPVATEQYGNVSNNLQNSNTGPTTENVNHQGALPGMVWQDRDVYLQGPIWAKIPHTDGHFHPSPLMGGFGLKHPPPQIMIKNTPVPANPPTNFSAAKFASFITQYSTGQVSVEIEWELQKENSKRWNPEIQYTSNYNKSVNVDFTVDTNGVYSEPRPIGTRYLTRNL

SEQ ID NO: 4171 - protein, 735 aa, Artificial Sequence
  source: /note="Description of Artificial Sequence: Synthetic polypeptide"
MAADGYLPDWLEDTLSEGIRQWWKLKPGPPPPKPAERHQDDSRGLVLPGYKYLGPFNGLDKGEPVNEADAAALEHDKAYDRQLDSGDNPYLKYNHADAEFQERLKEDTSFGGNLGRAVFQAKKRVLEPLGLVEEPVKTAPGKKRPVEHSPAEPDSSSGTGKAGQQPARKGLNFGQTGDADSVPDPQPLGQPPAAPTSLGSTTMATGSGAPMADNNEGADGVGNSSGNWHCDSQWLGDRVITTSTRTWALPTYNNHLYKQISSQSGASNDNHYFGYSTPWGYFDFNRFHCHFSPRDWQRLINNNWGFRPKRLNFKLFNIQVKEVTQNDGTTTIANNLTSTVQVFTDSEYQLPYVLGSAHQGCLPPFPADVFMVPQYGYLTLNNGSQAVGRSSFYCLEYFPSQMLRTGNNFTFSYTFEDVPFHSSYAHSQSLDRLMNPLIDQYLYYLNRTQSNSGTLQQSRLLFSQAGPTSMSLQAKNWLPGPCYRQQRLSKQANDNNNSNFPWTAATKYHLNGRDSLVNPGPAMASHKDDEEKFFPMHGTLIFGKQGTNANDADLEHVMITDEEEIRTTNPVATEQYGNVSNNLQNSNTGPTTENVNHQGALPGMVWQDRDVYLQGPIWAKIPHTDGHFHPSPLMGGFGLKHPPPQIMIKNTPVPANPPTNFSAAKFASFITQYSTGQVSVEIEWELQKENSKRWNPEIQYTSNYNKSVNVDFTVDTNGVYSEPRPIGTRYLTRNL

SEQ ID NO: 4172 - protein, 735 aa, Artificial Sequence
  source: /note="Description of Artificial Sequence: Synthetic polypeptide"
MAADGYLPDWLEDTLSEGIRQWWKLKPGPPPPKPAERHQDDSRGLVLPGYKYLGPFNGLDKGEPVNEADAAALEHDKAYDRQLDSGDNPYLKYNHADAEFQERLKEDTSFGGNLGRAVFQAKKRVLEPLGLVEEPVKTAPGKKRPVEHSPAEPDSSSGTGKAGQQPARKRLNFGQTGDADSVPDPQPLGQPPAAPTSLGSTTMATGSGAPMADNNEGADGVGNSSGNWHCDSQWLGDRVITTSTRTWALPTYNNHLYKQISSQSGASNDNHYFGYSTPWGYFDFNRFHCHFSPRDWQRLINNNWGFRPKRLNFKLFNIQVKEVTQNDGTATIANNLTSTVQVFTDSEYQLPYVLGSAHQGCLPPFPADVFMVPQYGYLTLNNGSQAVGRSSFYCLEYFPSQMLRTGNNFTFSYTFEDVPFHSSYAHSQSLDRLMNPLIDQYLYYLNRTQSNSGTLQQSRLLFSQAGPTSMSLQAKNWLPGPCYRQQRLSKQANDNNNSNFPWTAATKYHLNGRDSLVNPGPAMASHKDDEEKFFPMHGTLIFGKQGTNANDADLEHVMITDEEEIRTTNPVATEQYGNVSNNLQNSNTGPTTENVNHQGALPGMVWQDRDVYLQGPIWAKIPHTDGHFHPSPLMGGFGLKHPPPQIMIKNTPVPANPPTNFSAAKFASFITQYSTGQVSVEIEWELQKENSKRWNPEIQYTSNYNKSVNVDFTVDTNGVYSEPRPIGTRYLTRNL

SEQ ID NO: 4173 - protein, 735 aa, Artificial Sequence
  source: /note="Description of Artificial Sequence: Synthetic polypeptide"
MAADGYLPDWLEDTLSEGIRQWWKLKPGPPPPKPAERHQDDSRGLVLPGYKYLGPFNGLDKGEPVNEADAAALEHDKAYDRQLDSGDNPYLKYNHADAEFQERLKEDTSFGGNLGRAVFQAKKRVLEPLGLVEEPVKTAPGKKRPVEHSPAEPDSSSGTGKAGQQPARRRLNFGQTGDADSVPDPQPLGQPPAAPTSLGSTTMATGSGAPMADNNEGADGVGNSSGNWHCDSQWLGDRVITTSTRTWALPTYNNHLYKQISSQSGASNDNHYFGYSTPWGYFDFNRFHCHFSPRDWQRLINNNWGFRPKRLNFKLFNIQVKEVTQNDGTTTIANNLTSTVQVFTDSEYQLPYVLGSAHQGCLPPFPADVFMVPQYGYLTLNNGSQAVGRSSFYCLEYFPSQMLRTGNNFTFSYTFEDVPFHSSYAHSQSLDRLMNPLIDQYLYYLNRTQSNSGTLQQSRLLFSQAGPTSMSLQAKNWLPGPCYRQQRLSKQANDNNNSNFPWTAATKYHLNGRDSLVNPGPAMASHKDDEEKFFPMHGTLIFGKQGTNANDADLEHVMITDEEEIRTTNPVATEQYGNVSNNLQNSNTGPTTENVNHQGALPGMVWQDRDVYLQGPIWAKIPHTDGHFHPSPLMGGFGLKHPPPQIMIKNTPVPANPPTNFSAAKFASFITQYSTGQVSVEIEWELQKENSKRWNPEIQYTSNYNKSVNVDFTVDTNGVYSEPRPIGTRYLTRNL

SEQ ID NO: 4174 - protein, 735 aa, Artificial Sequence
  source: /note="Description of Artificial Sequence: Synthetic polypeptide"
MAADGYLPDWLEDTLSEGIRQWWKLKPGPPPPKPAERHQDDSRGLVLPGYKYLGPFNGLDKGEPVNEADAAALEHDKAYDRQLDSGDNPYLKYNHADAEFQERLKEDTSFGGNLGRAVFQAKKRVLEPLGLVEEPVKTAPGKKRPVEHSPAEPDSSSGTGKAGQQPARKRLNFGQTGDADSVPDPQPLGQPPAAPTSLGSTTMATGSGAPMADNNEGADGVGNSSGNWHCDSQWLGDRVITTSTRTWALPTYNNHLYKQISSQSGASNDNHYFGYSTPWGYFDFNRFHCHFSPRDWQRLINNNWGFRPKRLNFKLFNIQVKEVTQNDGTTTIANNLTSTVQVFTDSEYQLPYVLGSAHQGCLPPFPADVFMVPQYGYLTLNNGSQAVGRSSFYCLEYFPSQMLRTGNNFTFSYTFEDVPFHSSYAHSQSLDRLMNPLIDQYLYYLNRTQSNSGTLQQSRLLFSQAGPTSMSLQAKNWLPGPCYRQQRLSKQANDNNNSNFPWTAATKYHLNGRDSLVNPGPAMASHKDDEEKFFPMHGTLIFGKQGTNANDADLEHVMITDEEEIRTTNPVATEQYGNVSNNLQNSNTGPTTENVNHQGALPGMVWQDRDVYLQGPIWAKIPHTDGHFHPSPLMGGFGLKHPPPQIMIKNTPVPANPPTNFSAAKFASLITQYSTGQVSVEIEWELQKENSKRWNPEIQYTSNYNKSVNVDFTVDTNGVYSEPRPIGTRYLTRNL

SEQ ID NO: 4175 - protein, 735 aa, Artificial Sequence
  source: /note="Description of Artificial Sequence: Synthetic polypeptide"
MAADGYLPDWLEDTLSEGIRQWWKLKPGPPPPKPAERHQDDSRGLVLPGYKYLGPFNGLDKGEPVNEADAAALEHDKAYDRQLDSGDNPYLKYNHADAEFQERLKEDTSFGGNLGRAVFQAKKRVLEPLGLVEEPVKTAPGKKRPVEHSPAEPDSSSGTGKAGQQPARKRLNFGQTGDADSVPDPQPLGQPPAAPTSLGSTTMATGSGAPMADNNEGADGVGNSSGNWHCDSQWLGDRVITTSTRTWALPTYNNHLYKQISSQSGASNDNHYFGYSTPWGYFDFNRFHCHFSPRDWQRLINNNWGFRPKRLSFKLFNIQVKEVTQNDGTTTIANNLTSTVQVFTDSEYQLPYVLGSAHQGCLPPFPADVFMVPQYGYLTLNNGSQAVGRSSFYCLEYFPSQMLRTGNNFTFSYTFEDVPFHSSYAHSQSLDRLMNPLIDQYLYYLNRTQSNSGTLQQSRLLFSQAGPTSMSLQAKNWLPGPCYRQQRLSKQANDNNNSNFPWTAATKYHLNGRDSLVNPGPAMASHKDDEEKFFPMHGTLIFGKQGTNANDADLEHVMITDEEEIRTTNPVATEQYGNVSNNLQNSNTGPTTENVNHQGALPGMVWQDRDVYLQGPIWAKIPHTDGHFHPSPLMGGFGLKHPPPQIMIKNTPVPANPPTNFSAAKFASFITQYSTGQVSVEIEWELQKENSKRWNPEIQYTSNYNKSVNVDFTVDTNGVYSEPRPIGTRYLTRNL

SEQ ID NO: 4176 - protein, 735 aa, Artificial Sequence
  source: /note="Description of Artificial Sequence: Synthetic polypeptide"
MAADGYLPDWLEDTLSEGIRQWWKLKPGPPPPKPAERHQDDSRGLVLPGYKYLGPFNGLDKGEPVNEADAAALEHDKAYDRQLDSGDNPYLKYNHADAEFQERLKEDTSFGGNLGRAVFQAKKRVLEPLGLVEEPVKTAPGKKRPVEHSPAEPDSSSGTGKAGQQPARKRLNFGQTGDADSVPDPQPLGQPPAAPTSLGSTTMATGSGAPMADNNEGADGVGNSSGNWHCDSQWLGDRVITTSTRTWALPTYNNHLYKQISSQSGASNDNHYFGYSTPWGYFDFNRFHCHFSPRDWQRLINNNWGFRPKRLNFKLFNIQVKEVTQNDGTTTIANNLTSTVQVFTDSEYQLPYVLGSAHQGCLPPFPADVFMVPQYGYLTLNNGSQAVGRSSFYCLEYFPSQMLRTGNNFTFSYTFEDVPFHSSYAHSQSLDRLMNPLIDQYLYYLNRTQSNSGTLQQSRLLFSQAGPTSMSLQAKNWLPGPCYRQQRLSKQANDNNNSNFPWTAATKYHLNGRDSLVNPGPAMASHKDDEEKFFPMHGTLIFGKQGTNANDADLEHVMITDEEEIRTTNPVATGQYGNVSNNLQNSNTGPTTENVNHQGALPGMVWQDRDVYLQGPIWAKIPHTDGHFHPSPLMGGFGLKHPPPQIMIKNTPVPANPPTNFSAAKFASFITQYSTGQVSVEIEWELQKENSKRWNPEIQYTSNYNKSVNVDFTVDTNGVYSEPRPIGTRYLTRNL

SEQ ID NO: 4177 - protein, 735 aa, Artificial Sequence
  source: /note="Description of Artificial Sequence: Synthetic polypeptide"
MAADGYLPDWLEDTLSEGIRQWWKLKPGPPPPKPAERHQDDSRGLVLPGYKYLGPFNGLDKGEPVNEADAAALEHDKAYDRQLDSGDNPYLKYNHADAEFQERLKEDTSFGGNLGRAVFQAKKRVLEPLGLVEEPVKTAPGKKRPVEHSPAEPDSSSGTGKAGQQPARKRLNFGQTGDADSVPDPQPLGQPPAAPTSLGSTTMATGSGAPMADNNEGADGVGNSSGNWHCDSQWLGDRVITTSTRTWALPTYNNHLYKQISSQSGASNDNHYFGYSTPWGYFDFNRFHCHFSPRDWQRLINNNWGFRPKRLNFKLFNIQVKEVTQNDGTTTIANNLTSTVQVFTDSEYQLPYVLGSAHQGCLPPFPADVFMVPQYGYLTLNNGSQAVGRSSFYCLEYFPSQMLRTGNNFTFSYTFEDVPFHSSYAHSQSLDRLMNPLIDQYLYYLNRTQSNSGTLQQSRLLFSQAGPTSMSLQAKNWLPGPCYRQQRLSKQANDNNNSNFPWTAATKYHLNGRDSLVNPGPAMASHKDDEEKFFPMHGTLIFGKQGTNANDADLEHVMITDEEEIRTTNPVATEQYGNVPNNLQNSNTGPTTENVNHQGALPGMVWQDRDVYLQGPIWAKIPHTDGHFHPSPLMGGFGLKHPPPQIMIKNTPVPANPPTNFSAAKFASFITQYSTGQVSVEIEWELQKENSKRWNPEIQYTSNYNKSVNVDFTVDTNGVYSEPRPIGTRYLTRNL

SEQ ID NO: 4178 - protein, 735 aa, Artificial Sequence
  source: /note="Description of Artificial Sequence: Synthetic polypeptide"
MAADGYLPDWLEDTLSEGIRQWWKLKPGPPPPKPAERHQDDSRGLVLPGYKYLGPFNGLDKGEPVNEADAAALEHDKAYDRQLDSGDNPYLKYNHADAEFQERLKEDTSFGGNLGRAVFQAKKRVLEPLGLVEEPVKTAPGKKRPVEHSPAEPDSSSGTGKAGQQPARKRLNFGQTGDADSVPDPQPLGQPPAAPTSLGSTTMATGSGAPMADNNEGADGVGNSSGNWHCDSQWLGDRVITTSTRTWALPTYNNHLYKQISSQSGASNDNHYFGYSTPWGYFDFNRFHCHFSPRDWQRLINNNWGFRPKRLNFKLFNIQVKEVTQNDGTTTIANNLTSTVQVFTDSEYQLPYVLGSAHQGCLPPFPADVFMVPQYGYLTPNNGSQAVGRSSFYCLEYFPSQMLRTGNNFTFSYTFEDVPFHSSYAHSQSLDRLMNPLIDQYLYYLNRTQSNSGTLQQSRLLFSQAGPTSMSLQAKNWLPGPCYRQQRLSKQANDNNNSNFPWTAATKYHLNGRDSLVNPGPAMASHKDDEEKFFPMHGTLIFGKQGTNANDADLEHVMITDEEEIRTTNPVATEQYGNVSNNLQNSNTGPTTENVNHQGALPGMVWQDRDVYLQGPIWAKIPHTDGHFHPSPLMGGFGLKHPPPQIMIKNTPVPANPPTNFSAAKFASFITQYSTGQVSVEIEWELQKENSKRWNPEIQYTSNYNKSVNVDFTVDTNGVYSEPRPIGTRYLTRNL

SEQ ID NO: 4179 - protein, 735 aa, Artificial Sequence
  source: /note="Description of Artificial Sequence: Synthetic polypeptide"
MAADGYLPDWLEDTLSEGIRQWWKLKPGPPPPKPAERHQDDSRGLVLPGYKYLGPFNGLDKGEPVNEADAAALEHDKAYDRQLDSGDNPYLKYNHADAEFQERLKEDTSFGGNLGRAAFQAKKRVLEPLGLVEEPVKTAPGKKRPVEHSPAEPDSSSGTGKAGQQPARKRLNFGQTGDADSVPDPQPLGQPPAAPTSLGSTTMATGSGAPMADNNEGADGVGNSSGNWHCDSQWLGDRVITTSTRTWALPTYNNHLYKQISSQSGASNDNHYFGYSTPWGYFDFNRFHCHFSPRDWQRLINNNWGFRPKRLNFKLFNIQVKEVTQNDGTTTIANNLTSTVQVFTDSEYQLPYVLGSAHQGCLPPFPADVFMVPQYGYLTLNNGSQAVGRSSFYCLEYFPSQMLRTGNNFTFSYTFEDVPFHSSYAHSQSLDRLMNPLIDQYLYYLNRTQSNSGTLQQSRLLFSQAGPTSMSLQAKNWLPGPCYRQQRLSKQANDNNNSNFPWTAATKYHLNGRDSLVNPGPAMASHKDDEEKFFPMHGTLIFGKQGTNANDADLEHVMITDEEEIRTTNPVATEQYGNVSNNLQNSNTGPTTENVNHQGALPGMVWQDRDVYLQGPIWAKIPHTDGHFHPSPLMGGFGLKHPPPQIMIKNTPVPANPPTNFSAAKFASFITQYSTGQVSVEIEWELQKENSKRWNPEIQYTSNYNKSVNVDFTVDTNGVYSEPRPIGTRYLTRNL

SEQ ID NO: 4180 - protein, 735 aa, Artificial Sequence
  source: /note="Description of Artificial Sequence: Synthetic polypeptide"
MAADGYLPDWLEDTLSEGIRQWWKLKPGPPPPKPAERHQDDSRGLVLPGYKYLGPFNGLDKGEPVNEADAAALEHDKAYDRQLDSGDNPYLKYNHADAEFQERLKEDTSFGGNLGRAVFQAKKRVLEPLGLVEEPVKTAPGKKRPVEHSPAEPDSSSGTGKAGQQPARKRLNFGQTGDADSVPDPQPLGQPPAAPTSLGSTTMATGSGAPMADNNEGADGVGNSSGNWHCDSQWLGDRVITTSTRTWALPTYNNHLYKQISSQSGASNDNHYFGYSTPWGYFDFNRFHCHFSPRDWQRLINNNWGFRPKRLNFKLFNIQVKEVTQNDGTTTIANNLTSTVQVFTDSEYQLPYVLGSAHQGCLPPFPADVFMVPQYGYLTLNNGSQAVGRSSFYCLEYFPPQMLRTGNNFTFSYTFEDVPFHSSYAHSQSLDRLMNPLIDQYLYYLNRTQSNSGTLQQSRLLFSQAGPTSMSLQAKNWLPGPCYRQQRLSKQANDNNNSNFPWTAATKYHLNGRDSLVNPGPAMASHKDDEEKFFPMHGTLIFGKQGTNANDADLEHVMITDEEEIRTTNPVATEQYGNVSNNLQNSNTGPTTENVNHQGALPGMVWQDRDVYLQGPIWAKIPHTDGHFHPSPLMGGFGLKHPPPQIMIKNTPVPANPPTNFSAAKFASFITQYSTGQVSVEIEWELQKENSKRWNPEIQYTSNYNKSVNVDFTVDTNGVYSEPRPIGTRYLTRNL

SEQ ID NO: 4181 - protein, 735 aa, Artificial Sequence
  source: /note="Description of Artificial Sequence: Synthetic polypeptide"
MAADGYLPDWLEDTLPEGIRQWWKLKPGPPPPKPAERHQDDSRGLVLPGYKYLGPFNGLDKGEPVNEADAAALEHDKAYDRQLDSGDNPYLKYNHADAEFQERLKEDTSFGGNLGRAVFQAKKRVLEPLGLVEEPVKTAPGKKRPVEHSPAEPDSSSGTGKAGQQPARKRLNFGQTGDADSVPDPQPLGQPPAAPTSLGSTTMATGSGAPMADNNEGADGVGNSSGNWHCDSQWLGDRVITTSTRTWALPTYNNHLYKQISSQSGASNDNHYFGYSTPWGYFDFNRFHCHFSPRDWQRLINNNWGFRPKRLNFKLFNIQVKEVTQNDGTTTIANNLTSTVQVFTDSEYQLPYVLGSAHQGCLPPFPADVFMVPQYGYLTLNNGSQAVGRSSFYCLEYFPSQMLRTGNNFTFSYTFEDVPFHSSYAHSQSLDRLMNPLIDQYLYYLNRTQSNSGTLQQSRLLFSQAGPTSMSLQAKNWLPGPCYRQQRLSKQANDNNNSNFPWTAATKYHLNGRDSLVNPGPAMASHKDDEEKFFPMHGTLIFGKQGTNANDADLEHVMITDEEEIRTTNPVATEQYGNVSNNLQNSNTGPTTENVNHQGALPGMVWQDRDVYLQGPIWAKIPHTDGHFHPSPLMGGFGLKHPPPQIMIKNTPVPANPPTNFSAAKFASFITQYSTGQVSVEIEWELQKENSKRWNPEIQYTSNYNKSVNVDFTVDTNGVYSEPRPIGTRYLTRNL

SEQ ID NO: 4182 - protein, 735 aa, Artificial Sequence
  source: /note="Description of Artificial Sequence: Synthetic polypeptide"
MAADGYLPDWLEDTLSEGIRQWWKLKPGPPPPKPAERHQDDSRGLVLPGYKYLGPFNGLDKGEPVNEADAAALEHDKAYDRQLDSGDNPYLKYNHADAEFQERLKEDTSFGGNLGRAVFQAKKRVLEPLGLVEEPVKTAPGKKRPVEHSPAEPDSSSGTGKAGQQPARKRLNFGQTGDADSVPDPQPLGQPPAAPTSLGSTTMATGSGAPMADNNEGADGVGNSSGNWHCDSQWLGDRVITTSTRTWALPTYNNHLYKQISSQSGASNDNHYFGYSTPWGYFDFNRFHCHFSPRDWQRLINNNWGFRPKRLNFKLFNIQVKEVTQNDGTTTIANNLTSTVQVFTDSEYQLPYVLGSAHQGCLPPFPADVFMVPQYGYLTLNNGSQAVGRSSFYCLEYFPSQMLRTGNNFTFSYTFEDVPFHSSYAHSQSLDRLMNPLIDQYLYYLNRTQSNSGTLQQSRLLFSQAGPTSMSLQAKNWLPGPCYRRQRLSKQANDNNNSNFPWTAATKYHLNGRDSLVNPGPAMASHKDDEEKFFPMHGTLIFGKQGTNANDADLEHVMITDEEEIRTTNPVATEQYGNVSNNLQNSNTGPTTENVNHQGALPGMVWQDRDVYLQGPIWAKIPHTDGHFHPSPLMGGFGLKHPPPQIMIKNTPVPANPPTNFSAAKFASFITQYSTGQVSVEIEWELQKENSKRWNPEIQYTSNYNKSVNVDFTVDTNGVYSEPRPIGTRYLTRNL

SEQ ID NO: 4183 - protein, 735 aa, Artificial Sequence
  source: /note="Description of Artificial Sequence: Synthetic polypeptide"
MAADGYLPDWLEDTLSEGIRQWWKLKPGPPPPKPAERHQDDSRGLVLPGYKYLGPFNGLDKGEPVNEADAAALEHDKAYDRQLDSGDNPYLKYNHADAEFQERLKEDTSFGGNLGRAVFQAKKRVLEPLGLVEEPVKTAPGKKRPVEHSPAEPDSSSGTGKAGQQPARKRLNFGQTGDADSVPDPQPLGQPPAAPTSLGSTTMATGSGAPMADNNEGADGVGNSSGNWHCDSQWLGDRVITTSTRTWALPTYNNHLYKQISSQSGASNDNHYFGYSTPWGYFDFNRFHCHFSPRDWQRLINNNWGFRPKRLNFKLFNIQVKEVTQNDGTTTIANNLTSTVQVFTDSEYQLPYVLGSAHQGCLPPFPADVFMVPQYGYLTLNNGSQAVGRSSFYCLEYLPSQMLRTGNNFTFSYTFEDVPFHSSYAHSQSLDRLMNPLIDQYLYYLNRTQSNSGTLQQSRLLFSQAGPTSMSLQAKNWLPGPCYRQQRLSKQANDNNNSNFPWTAATKYHLNGRDSLVNPGPAMASHKDDEEKFFPMHGTLIFGKQGTNANDADLEHVMITDEEEIRTTNPVATEQYGNVSNNLQNSNTGPTTENVNHQGALPGMVWQDRDVYLQGPIWAKIPHTDGHFHPSPLMGGFGLKHPPPQIMIKNTPVPANPPTNFSAAKFASFITQYSTGQVSVEIEWELQKENSKRWNPEIQYTSNYNKSVNVDFTVDTNGVYSEPRPIGTRYLTRNL

SEQ ID NO: 4184 - protein, 735 aa, Artificial Sequence
  source: /note="Description of Artificial Sequence: Synthetic polypeptide"
MAADGYLPDWLEDTLSEGIRQWWKLKPGPPPPKPAERHQDDSRGLVLPGYKYLGPFNGLDKGEPVNEADAAALEHDKAYDRQLDSGDNPYLKYNHADAEFQERLKEDTSFGGNLGRAVFQAKKRVLEPLGLVEEPVKTAPGKKRPVEHSPAEPDSSSGTGKAGQQPARKRLNFGQTGDADSVPDPQPLGQPPAAPTSLGSTTMATGSGAPMADNNEGADGVGNSSGNWHCDSQWLGDRVITTSTRTWALPTYNNHLYKQISSQSGASNDNHYFGYSTPWGYFDFNRFHCHFSPRDWQRLINNNWGFRPKRLNFKLFNIQVKEVTQNDGTTTIANNLTSTVQVFTDSEYQLPYVLGSAHQGCLPPFPADVFMVPQYGYLTLNNGSQAVGRSSFYCLEYFPSQMLRTGNNFTFSYTFEDVPFHSSYAHSQSLDRLMNPLIDQYLYYLNRTQSNSGTLQQSRLLFSQAGPTSMSLQAKNWLPGPCYRQQRLSKQANDNNNGNFPWTAATKYHLNGRDSLVNPGPAMASHKDDEEKFFPMHGTLIFGKQGTNANDADLEHVMITDEEEIRTTNPVATEQYGNVSNNLQNSNTGPTTENVNHQGALPGMVWQDRDVYLQGPIWAKIPHTDGHFHPSPLMGGFGLKHPPPQIMIKNTPVPANPPTNFSAAKFASFITQYSTGQVSVEIEWELQKENSKRWNPEIQYTSNYNKSVNVDFTVDTNGVYSEPRPIGTRYLTRNL

SEQ ID NO: 4185 - protein, 735 aa, Artificial Sequence
  source: /note="Description of Artificial Sequence: Synthetic polypeptide"
MAADGYLPDWLEDTLSEGIRQWWKLKPGPPPPKPAERHQDDSRGLVLPGYKYLGPFNGLDKGEPVNEADAAALEHDKAYDRQFDSGDNPYLKYNHADAEFQERLKEDTSFGGNLGRAVFQAKKRVLEPLGLVEEPVKTAPGKKRPVEHSPAEPDSSSGTGKAGQQPARKRLNFGQTGDADSVPDPQPLGQPPAAPTSLGSTTMATGSGAPMADNNEGADGVGNSSGNWHCDSQWLGDRVITTSTRTWALPTYNNHLYKQISSQSGASNDNHYFGYSTPWGYFDFNRFHCHFSPRDWQRLINNNWGFRPKRLNFKLFNIQVKEVTQNDGTTTIANNLTSTVQVFTDSEYQLPYVLGSAHQGCLPPFPADVFMVPQYGYLTLNNGSQAVGRSSFYCLEYFPSQMLRTGNNFTFSYTFEDVPFHSSYAHSQSLDRLMNPLIDQYLYYLNRTQSNSGTLQQSRLLFSQAGPTSMSLQAKNWLPGPCYRQQRLSKQANDNNNSNFPWTAATKYHLNGRDSLVNPGPAMASHKDDEEKFFPMHGTLIFGKQGTNANDADLEHVMITDEEEIRTTNPVATEQYGNVSNNLQNSNTGPTTENVNHQGALPGMVWQDRDVYLQGPIWAKIPHTDGHFHPSPLMGGFGLKHPPPQIMIKNTPVPANPPTNFSAAKFASFITQYSTGQVSVEIEWELQKENSKRWNPEIQYTSNYNKSVNVDFTVDTNGVYSEPRPIGTRYLTRNL

SEQ ID NO: 4186 - protein, 735 aa, Artificial Sequence
  source: /note="Description of Artificial Sequence: Synthetic polypeptide"
MAADGYLPDWLEDTLSEGIRQWWKLKPGPPPPKPAERHQDDSRGLVLPGYKYLGPFNGLDKGEPVNEADAAALEHDKAYDRQLDSGDNPYLKYNHADAEFQERLKEDTSFGGNLGRAVFQAKKRVLEPLGLVEEPVKTAPGKKRPVEHSPAEPDSSSGTGKAGQQPARKRLNFGQTGDADSVPDPQPLGQPPAAPTSLGSTTMATGSGAPMADNNEGADGVGNSSGNWHCDSQWLGDRVITTSTRTWALPTYNNHLYKQISSQSGASNDNHYFGYSTPWGYFDFNRFHCHFSPRDRQRLINNNWGFRPKRLNFKLFNIQVKEVTQNDGTTTIANNLTSTVQVFTDSEYQLPYVLGSAHQGCLPPFPADVFMVPQYGYLTLNNGSQAVGRSSFYCLEYFPSQMLRTGNNFTFSYTFEDVPFHSSYAHSQSLDRLMNPLIDQYLYYLNRTQSNSGTLQQSRLLFSQAGPTSMSLQAKNWLPGPCYRQQRLSKQANDNNNSNFPWTAATKYHLNGRDSLVNPGPAMASHKDDEEKFFPMHGTLIFGKQGTNANDADLEHVMITDEEEIRTTNPVATEQYGNVSNNLQNSNTGPTTENVNHQGALPGMVWQDRDVYLQGPIWAKIPHTDGHFHPSPLMGGFGLKHPPPQIMIKNTPVPANPPTNFSAAKFASFITQYSTGQVSVEIEWELQKENSKRWNPEIQYTSNYNKSVNVDFTVDTNGVYSEPRPIGTRYLTRNL

SEQ ID NO: 4187 - protein, 735 aa, Artificial Sequence
  source: /note="Description of Artificial Sequence: Synthetic polypeptide"
MAADGYLPDWLEDTLSEGIRQWWKLKPGPPPPKPAERHQDDSRGLVLPGYKYLGPFNGLDKGEPVNEADAAALEHDKAYDRQLDSGDNPYLKYNHADAEFQERLKEDTSFGGNLGRAVFQAKKRVLEPLGLVEEPVKTAPGKKRPVEHSPAEPDSSSGTGKAGQQPARKRLNFGQTGDADSVPDPQPLGQPPAAPTSLGSTTMATGSGAPMADNNEGADGVGNSSGNWHCDSQWLGDRVITTSTRTWALPAYNNHLYKQISSQSGASNDNHYFGYSTPWGYFDFNRFHCHFSPRDWQRLINNNWGFRPKRLNFKLFNIQVKEVTQNDGTTTIANNLTSTVQVFTDSEYQLPYVLGSAHQGCLPPFPADVFMVPQYGYLTLNNGSQAVGRSSFYCLEYFPSQMLRTGNNFTFSYTFEDVPFHSSYAHSQSLDRLMNPLIDQYLYYLNRTQSNSGTLQQSRLLFSQAGPTSMSLQAKNWLPGPCYRQQRLSKQANDNNNSNFPWTAATKYHLNGRDSLVNPGPAMASHKDDEEKFFPMHGTLIFGKQGTNANDADLEHVMITDEEEIRTTNPVATEQYGNVSNNLQNSNTGPTTENVNHQGALPGMVWQDRDVYLQGPIWAKIPHTDGHFHPSPLMGGFGLKHPPPQIMIKNTPVPANPPTNFSAAKFASFITQYSTGQVSVEIEWELQKENSKRWNPEIQYTSNYNKSVNVDFTVDTNGVYSEPRPIGTRYLTRNL

SEQ ID NO: 4188 - protein, 734 aa, Artificial Sequence
  source: /note="Description of Artificial Sequence: Synthetic polypeptide"
MAADGYLPDWLEDTLSEGIRQWWKLKPGPPPPKPAERHQDDSRGLVLPGYKYLGPFNGLDKGEPVNEADAAALEHDKAYDRQLDSGDNPYLKYNHADAEFQERLKEDTSFGGNLGRAVFQAKKRVLEPLGLVEEPVKTAPGKKRPVEHSPAEPDSSSGTGKAGQQPARKRLNFGQTGDADSVPDPQPLGQPPAAPTSLGSTTMATGSGAPMADNNEGADGVGNSSGNWHCDSQWLGDRVITTSTRTWALPTYNNHLYKQISSQSGASNDNHYFGYSTPWGYFDFNRFHCHFSPRDWQRLINNNWGFRPKRLNFKLFNIQVKEVTQNDGTTTIANNLTSTVQVFTDSEYQLPYVLGSAHQGCLPPFPADAFMVPQYGYLTLNNGSQAVGRSSFYCLEYFPSQMLRTGNNFTFSYTFEDVPFHSSYAHSQSLDRLMNPLIDQYLYYLNRTQSNSGTLQQSRLLFSQAGPTSMSLQAKNWLPGPCYRQQRLSKQANDNNSNFPWTAATKYHLNGRDSLVNPGPAMASHKDDEEKFFPMHGTLIFGKQGTNANDADLEHVMITDEEEIRTTNPVATEQYGNVSNNLQNSNTGPTTENVNHQGALPGMVWQDRDVYLQGPIWAKIPHTDGHFHPSPLMGGFGLKHPPPQIMIKNTPVPANPPTNFSAAKFASFITQYSTGQVSVEIEWELQKENSKRWNPEIQYTSNYNKSVNVDFTVDTNGVYSEPRPIGTRYLTRNL

SEQ ID NO: 4189 - protein, 735 aa, Artificial Sequence
  source: /note="Description of Artificial Sequence: Synthetic polypeptide"
MAADGYLPDWLEDTLSEGIRQWWKLKPGPPPPKPAERHQDDSRGLVLPGYKYLGPFNGLDKGEPVNEADAAALEHDKAYDRQLDSGDNPYLKYNHADAEFQERLKEDTSFGGNLGRAVFQAKKRVLEPLGLVEEPVKTAPGKKRPVEHSPAEPDSSSGTGKAGQQPARKRLNFGQTGDADSVPDPQPLGQPPAAPTSLGSTTMATGSGAPMADNNEGADGVGNSSGNWHCDSQWLGDRVITTSTRTWALPTYNNHLYKQISSQSGASNDNHYFGYSTPWGYFDFNRFHCHFSPRGWQRLINNNWGFRPKRLNFKLFNIQVKEVTQNDGTTTIANNLTSTVQVFTDSEYQLPYVLGSAHQGCLPPFPADVFMVPQYGYLTLNNGSQAVGRSSFYCLEYFPSQMLRTGNNFTFSYTFEDVPFHSSYAHSQSLDRLMNPLIDQYLYYLNRTQSNSGTLQQSRLLFSQAGPTSMSLQAKNWLPGPCYRQQRLSKQANDNNNSNFPWTAATKYHLNGRDSLVNPGPAMASHKDDEEKFFPMHGTLIFGKQGTNANDADLEHVMITDEEEIRTTNPVATEQYGNVSNNLQNSNTGPTTENVNHQGALPGMVWQDRDVYLQGPIWAKIPHTDGHFHPSPLMGGFGLKHPPPQIMIKNTPVPANPPTNFSAAKFASFITQYSTGQVSVEIEWELQKENSKRWNPEIQYTSNYNKSVNVDFTVDTNGVYSEPRPIGTRYLTRNL

SEQ ID NO: 4190 - protein, 735 aa, Artificial Sequence
  source: /note="Description of Artificial Sequence: Synthetic polypeptide"
MAADGYLPDWLEDTLSEGIRQWWKLKPGPPPPKPAERHQDDSRGLVLPGYKYLGPFNGLDKGEPVNEADAAALEHDKAYDRQLDSGDNPYLKYNHADAEFQERLKEDTSFGGNLGRAVFQAKKRVLEPLGLVEEPVKTAPGKKRPVEHSPAEPDSSSGTGKAGQQPARKRLNFGQTGDADSVPDPQPLGQPPAAPTSLGSTTMATGSGAPMADNNEGADGVGNSSGNWHCDSQWLGDRVITTSTRTWALPTYNNHLYKQISSQSGASNDNHYFGYSTPWGYFDFNRFHCHFSPRDWQRLINNNWGFRPKRLNFKLFNIQVKEVTQNDGTTTIANNLTSTVQVFTDSEYQLPYVLGSAHQGCLPPFPADVFMVPQYGYLTLNNGSQAVGRSSFYCLEYFPSQMLRTGNNFTFSYTFEDVPFHSSYAHSQSLDRLMNPLIDQYLYYLNGTQSNSGTLQQSRLLFSQAGPTSMSLQAKNWLPGPCYRQQRLSKQANDNNNSNFPWTAATKYHLNGRDSLVNPGPAMASHKDDEEKFFPMHGTLIFGKQGTNANDADLEHVMITDEEEIRTTNPVATEQYGNVSNNLQNSNTGPTTENVNHQGALPGMVWQDRDVYLQGPIWAKIPHTDGHFHPSPLMGGFGLKHPPPQIMIKNTPVPANPPTNFSAAKFASFITQYSTGQVSVEIEWELQKENSKRWNPEIQYTSNYNKSVNVDFTVDTNGVYSEPRPIGTRYLTRNL

SEQ ID NO: 4191 - protein, 735 aa, Artificial Sequence
  source: /note="Description of Artificial Sequence: Synthetic polypeptide"
MAADGYLPDWLEDTLSEGIRQWWKLKPGPPPPKPAERHQDDSRGLVLPGYKYLGPFNGLDKGEPVNEADAAALEHDKAYDRQLDSGDNPYLKYNHADAEFQERLKEDTSFGGNLGRAVFQAKKRVLEPLGLVEEPVKTAPGKKRPVEHSPAEPDSSSGTGKAGQQPARKRLNFGQTGDADSVPDPQPLGQPPAAPTSLGSTTMATGSGAPMADNNEGADGVGNSSGNWHCDSQWLGDRVITTSTRTWALPTYNNHLYKQISSQSGASNDNHYFGYSTPWGYFDFNRFHCHLSPRDWQRLINNNWGFRPKRLNFKLFNIQVKEVTQNDGTTTIANNLTSTVQVFTDSEYQLPYVLGSAHQGCLPPFPADVFMVPQYGYLTLNNGSQAVGRSSFYCLEYFPSQMLRTGNNFTFSYTFEDVPFHSSYAHSQSLDRLMNPLIDQYLYYLNRTQSNSGTLQQSRLLFSQAGPTSMSLQAKNWLPGPCYRQQRLSKQANDNNNSNFPWTAATKYHLNGRDSLVNPGPAMASHKDDEEKFFPMHGTLIFGKQGTNANDADLEHVMITDEEEIRTTNPVATEQYGNVSNNLQNSNTGPTTENVNHQGALPGMVWQDRDVYLQGPIWAKIPHTDGHFHPSPLMGGFGLKHPPPQIMIKNTPVPANPPTNFSAAKFASFITQYSTGQVSVEIEWELQKENSKRWNPEIQYTSNYNKSVNVDFTVDTNGVYSEPRPIGTRYLTRNL

SEQ ID NO: 4192 - protein, 735 aa, Artificial Sequence
  source: /note="Description of Artificial Sequence: Synthetic polypeptide"
MAADGYLPDWLEDTLSEGIRQWWKLKPGPPPPKPAERHQDDSRGLVLPGYKYLGPFNGLDKGEPVNEADAAALGHDKAYDRQLDSGDNPYLKYNHADAEFQERLKEDTSFGGNLGRAVFQAKKRVLEPLGLVEEPVKTAPGKKRPVEHSPAEPDSSSGTGKAGQQPARKRLNFGQTGDADSVPDPQPLGQPPAAPTSLGSTTMATGSGAPMADNNEGADGVGNSSGNWHCDSQWLGDRVITTSTRTWALPTYNNHLYKQISSQSGASNDDHYFGYSTPWGYFDFNRFHCHFSPRDWQRLINNNWGFRPKRLNFKLFNIQVKEVTQNDGTTTIANNLTSTVQVFTDSEYQLPYVLGSAHQGCLPPFPADVFMVPQYGYLTLNNGSQAVGRSSFYCLEYFPSQMLRTGNNFTFSYTFEDVPFHSSYAHSQSLDRLMNPLIDQYLYYLNRTQSNSGTLQQSRLLFSQAGPTSMSLQAKNWLPGPCYRQQRLSKQANDNNNSNFPWTAATKYHLNGRDSLVNPGPAMASHKDDEEKFFPMHGTLIFGKQGTNANDADLEHVMITDEEEIRTTNPVATEQYGNVSNNLQNSNTGPTTENVNHQGALPGMVWQDRDVYLQGPIWAKIPHTDGHFHPSPLMGGFGLKHPPPQIMIKNTPVPANPPTNFSAAKFASFITQYSTGQVSVEIEWELQKENSKRWNPEIQYTSNYNKSVNVDFTVDTNGVYSEPRPIGTRYLTRNL

SEQ ID NO: 4193 - protein, 735 aa, Artificial Sequence
  source: /note="Description of Artificial Sequence: Synthetic polypeptide"
MAADGYLPDWLEDTLSEGIRQWWKLKPGPPPPKPAERHQDDSRGLVLPGYKYLGPFNGLDKGEPVNEADAAALEHDKAYDRQLDSGDNPYLKYNHADAEFQERLKEDTSFGGNLGRAVFQAKKRVLEPLGLVEEPVKTAPGKKRPVEHSPAEPDSSSGTGKAGQQPARKRLNFGQTGDADSVPDPQPLGQPPAAPTSLGSTTMATGSGAPMADNNEGADGVGNSSGNWHCDSQWLGDRVITTSTRTWALPTYNNHLYKQISSQSGASNDNHYFGYSTPWGYFDFNRFHCHFSPRDWQRLINNNWGFRPKRLNFKLFNIQVKEVTQNDGTTTIANNLTSTVQVFTDSEYQLPYVLGSAHQGCLPPFPADVFMVPQYGYLTLNNGSQAVGRSSFYCLEYFPSQMLRTGNNFTFSYTFEDVPFHSSYAHSQSLDRLMNPLIDQYLYYLNRTQSNSGTLQQSRLLFSQAGPTSMSLQAKNWLPGPCYRQQRLSKQANDNNNSNFPWTAATKYHLNGRDSLVNPGPAMASHKDDEEKFFPMHGTLIFGKQGTNANDADLEHVMITDEEEIRTTNPVATEQYGNVSNNLQNSNTGPTTENVNHQGALPGMVWQDRDVYLQGPIWAKIPHTDGHFRPSPLMGGFGLKHPPPQIMIKNTPVPANPPTNFSAAKFASFITQYSTGQVSVEIEWELQKENSKRWNPEIQYTSNYNKSVNVDFTVDTNGVYSEPRPIGTRYLTRNL

SEQ ID NO: 4194 - protein, 735 aa, Artificial Sequence
  source: /note="Description of Artificial Sequence: Synthetic polypeptide"
MAADGYLPDWLEDTLSEGIRQWWKLKPGPPPPKPAERHQDDSRGLVLPGYKYLGPFNGLDKGEPVNEADAAALEHDKAYDRQLDSGDNPYLKYNHADAEFQERLKEDTSFGGNLGRAVFQAKKRVLEPLGLVEEPVKTAPGKKRPVEHSPAEPDSSSGTGKAGQQPARKRLNFGQTGDADSVPDPQPLGQPPAAPTSLGSTTMATGSGAPMADNNEGADGVGNSSGNWHCDSQWLGDRVITTSTRTWALPTYNNHLYKQISSQSGASNDNHYFGYSTPWGYFDFNRFHCHFSPRDWQRLINNNWGFRPKRLNFKLFNIQVKEVTQNDGTTTIANNLTSTVQVFTDSEYQLPYVLGSAHQGCLPPFPADVFMVPQYGYLTLNNGSQAVGRSSFYCLEYFPSQMLRTGNNFTFSYTFEDVPFHSSYAHSQSLDRLMNPLIDQYLYYLNRTQSNSGTLQQSRLLFSQAGPTSMSLQAKNWLPGPCYRQQRLSKQANDNNNSNFPWTAATKYHLNGRDSLVNPGPAMASHKDDEEKFFPMHGTLIFGKQGTNANDADLEHVMITDEEEIRTTNPVATEQYGNVSNNLQNSNTGPTTENVNHQGALPGMVWQDRDVYLQGPIWAKIPHTDGHFHPSPLMGGFGLKHPPPQIMIKNTPVPANPPTNFSAAKSASFITQYSTGQVSVEIEWELQKENSKRWNPEIQYTSNYNKSVNVDFTVDTNGVYSEPRPIGTRYLTRNL

SEQ ID NO: 4195 - protein, 735 aa, Artificial Sequence
  source: /note="Description of Artificial Sequence: Synthetic polypeptide"
MAADGYLPDWLEDTLSEGIRQWWKLKPGPPPPKPAERHQDDSRGLVLPGYKYLGPFNGLDKGEPVNEADAAALEHDKAYDRQLDSGDNPYLKYNHADAEFQERLKEDTSFGGNLGRAVFQAKKRVLEPLGLVEEPVKTAPGKKRPVEHSPAEPDSSSGTGKAGQQPARKRLNFGQTGDADSVPDPQPLGQPPAAPTSLGSTTMATGSGAPMADNNEGADGVGNSSGNWHCDSQWLGDRVITTSTRTWALPTYNNHLYKQISSQSGASNDNHYFGYSTPWGYFDFNRFHCHFSPRDWQRLINNNWGFRPKRLNFKLFNIQVKGVTQNDGTTTIANNLTSTVQVFTDSEYQLPYVLGSAHQGCLPPFPADVFMVPQYGYLTLNNGSQAVGRSSFYCLEYFPSQMLRTGNNFTFSYTFEDVPFHSSYAHSQSLDRLMNPLIDQYLYYLNRTQSNSGTLQQSRLLFSQAGPTSMSLQAKNWLPGPCYRQQRLSKQANDNNNSNFPWTAATKYHLNGRDSLVNPGPAMASHKDDEEKFFPMHGTLIFGKQGTNANDADLEHVMITDEEEIRTTNPVATEQYGNVSNNLQNSNTGPTTENVNHQGALPGMVWQDRDVYLQGPIWAKIPHTDGHFHPSPLMGGFGLKHPPPQIMIKNTPVPANPPTNFSAAKFASFITQYSTGQVSVEIEWELQKENSKRWNPEIQYTSNYNKSVNVDFTVDTNGVYSEPRPIGTRYLTRNL

SEQ ID NO: 4196 - protein, 735 aa, Artificial Sequence
  source: /note="Description of Artificial Sequence: Synthetic polypeptide"
MAADGYLPDWLEDTLSEGIRQWWKLKPGPPPPKPAERHQDDSRGLVLPGYKYLGPFNGLDKGEPVNEADAAALEHDKAYDRQLDSGDNPYLKYNHADAEFQERLKEDTSFGGNLGRAVFQAKKRVLEPLGLVEEPVKTAPGKKRPVEHSPAEPDSSSGTGKAGQQPARKRLNFGQTGDADSVPDPQPLGQPPAAPTSLGSTTMATGSGAPMADNNEGADGVGNSSGNWHCDSQWLGDRVITTSTRTWALPTYNNHLYKQISSQSGASNDNHYFGYSTPWGYFDFNRFHCHFSPRDWQRLINNNWGFRPKRLNFKLFNIQVKEVTQNDGTTTIANNLTSTVQVFTDSEYQLPYVLGSAHQGCLPPFPADVFMVPQYGYLTLNNGSQAVGRSSFYCLEYFPSQMLRTGNNFTFSYTFEDVPFHSSYAHSQSLDRLMNPLIDQYLYYLNRTQSNSGTLQQSRLLFSQAGPTSMSLQAKNWLPGPCYRQQRLSKQANDNNNSNFPWTAATKYHLNGRDSLVNPGPAMASHKDDEEKFFPMHGTPIFGKQGTNANDADLEHVMITDEEEIRTTNPVATEQYGNVSNNLQNSNTGPTTENVNHQGALPGMVWQDRDVYLQGPIWAKIPHTDGHFHPSPLMGGFGLKHPPPQIMIKNTPVPANPPTNFSAAKFASFITQYSTGQVSVEIEWELQKENSKRWNPEIQYTSNYNKSVNVDFTVDTNGVYSEPRPIGTRYLTRNL

SEQ ID NO: 4197 - protein, 735 aa, Artificial Sequence
  source: /note="Description of Artificial Sequence: Synthetic polypeptide"
MAADGYLPDWLEDTLSEGIRQWWKLKPGPPPPKPAERHQDDSRGLVLPGYKYLGPFNGLDKGEPVNEADAAALEHDKAYDRQLDSGDNPYLKYNHADAEFQERLKEDTSFGGNLGRAVFQAKKGVLEPLGLVEEPVKTAPGKKRPVEHSPAEPDSSSGTGKAGQQPARKRLNFGQTGDADSVPDPQPLGQPPAAPTSLGSTTMATGSGAPMADNNEGADGVGNSSGNWHCDSQWLGDRVITTSTRTWALPTYNNHLYKQISSQSGASNDNHYFGYSTPWGYFDFNRFHCHFSPRDWQRLINNNWGFRPKRLNFKLFNIQVKEVTQNDGTTTIANNLTSTVQVFTDSEYQLPYVLGSAHQGCLPPFPADVFMVPQYGYLTLNNGSQAVGRSSFYCLEYFPSQMLRTGNNFTFSYTFEDVPFHSSYAHSQSLDRLMNPLIDQYLYYLNRTQSNSGTLQQSRLLFSQAGPTSMSLQAKNWLPGPCYRQQRLSKQANDNNNSNFPWTAATKYHLNGRDSLVNPGPAMASHKDDEEKFFPMHGTLIFGKQGTNANDADLEHVMITDEEEIRTTNPVATEQYGNVSNNLQNSNTGPTTENVNHQGALPGMVWQDRDVYLQGPIWAKIPHTDGHFHPSPLMGGFGLKHPPPQIMIKNTPVPANPPTNFSAAKFASFITQYSTGQVSVEIEWELQKENSKRWNPEIQYTSNYNKSVNVDFTVDTNGVYSEPRPIGTRYLTRNL

SEQ ID NO: 4198 - protein, 735 aa, Artificial Sequence
  source: /note="Description of Artificial Sequence: Synthetic polypeptide"
MAADGYLPDWLEDTLSEGIRQWWKLKPGPPPPKPAERHQDDSRGLVLPGYKYLGPFNGLDKGEPVNEADAAALEHDKAYDRQLDSGDNPYLKYNHADAEFQERLKEDTSFGGNLGRAVFQAKKRVLEPLGLVEEPVKTAPGKKRPVEHSPAEPDSSSGTGKAGQQPARKRLNFGQTGDADSVPDPQPLGQPPAAPTSLGSTTMATGSGAPMADNNEGADGVGNSSGNWHCDSQWLGDRVITTSTRTWALPTYNNHLYKQISSQSGASNDNHYFGYSTPWGYFDFNRFHCHFSPRDWQRLINNNWGFRPKRLNFKLFNIQVKEVTQNDGTTTIANNLTSTVQVFTDSEYQLPYVLGSAHQGCLPPFPADVFMVPQYGYLTLNNGSQAVGRSSFYCLEYFPSQMLRTGNNFTFSYTFEDVPFHSSYAHSQSLDRLMNPLIGQYLYYLNRTQSNSGTLQQSRLLFSQAGPTSMSLQAKNWLPGPCYRQQRLPKQANDNNNSNFPWTAATKYHLNGRDSLVNPGPAMASHKDDEEKFFPMHGTLIFGKQGTNANDADLEHVMITDEEEIRTTNPVATEQYGNVSNNLQNSNTGPTTENVNHQGALPGMVWQDRDVYLQGPIWAKIPHTDGHFHPSPLMGGFGLKHPPPQIMIKNTPVPANPPTNFSAAKFASFITQYSTGQVSVEIEWELQKENSKRWNPEIQYTSNYNKSVNVDFTVDTNGVYSEPRPIGTRYLTRNL

SEQ ID NO: 4199 - protein, 735 aa, Artificial Sequence
  source: /note="Description of Artificial Sequence: Synthetic polypeptide"
MAADGYLPDWLEDTLSEGIRQWWKLKPGPPPPKPAERHQDDSRGLVLPGYKYLGPFNGLDKGEPVNEADAAALEHDKAYDRQLDSGDNPYLKYNHADAEFQERLKEDTSFGGNLGRAVFQAKKRVLEPLGLVEEPVKTAPGKKRPVEHSPAEPDSSSGTGKAGQQPARKRLNFGQTGDADSVPDPQPLGQPPAAPTSLGSTTMATGSGAPMADNNEGADGVGNSSGNWHCDSQWLGDRVITTSTRTWALPTYNNHLYKQISSQSGASNDNHYFGYSTPWGYFDFNRFHCHFSPRDWQRLINNNWGFRPKRLNFKLFNIQVKEVTQNDGTTTIANNLTSTVQVFTDSEYQLPYVLGSAHQGCLPPFPADVFMVPQYGYLTLNNGSQAVGRSSFYCLEYFPSQMLRTGNNFTFSYTFEDVPFHSSYAHSQSLDRLMNPLIDQYLYYLNRTQSNSGTLQQSRLLFSQAGPTSMSLQAKNWLPGPCYRQQRLSKQANDNNNSNFPWTAATKYHLNGRDSLVNPGPAMASHKDDEEKFFPMHGTLIFGKQGTNANDADLEHVMITDEEEIRTTNPVATEQYGNVSNNLQNSNTGPTTENVNHQGALPGMVWQDRDVYLQGPIWAKIPHTDGRFHPSPLMGGFGLKHPPPQIMIKNTPVPANPPTNFSAAKFASFITQYSTGQVSVEIEWELQKENSKRWNPEIQYTSNYNKSVNVDFTVDTNGVYSEPRPIGTRYLTRNL

SEQ ID NO: 4200 - protein, 735 aa, Artificial Sequence
  source: /note="Description of Artificial Sequence: Synthetic polypeptide"
MAADGYLPDWLEDTLSEGIRQWWKLKPGPPPPKPAERHQDDSRGLVLPGYKYLGPFNGLDKGEPVNEADAAALEHDKAYDRQLDSGDNPYLKYNHADAEFQERLKEDTSFGGNLGRAVFQAKKRVLEPLGLVEEPVKTAPGKKRPVEHSPAEPDSSSGTGKAGQQPARKRLNFGQTGDADSVPDPQPLGQPPAAPTSLGSTTMATGSGAPMADNNEGADGVGNSSGNWHCDSQWLGDRVITTSTRTWALPTYNNHLYKQISSQSGASNDNHYFGYSTPWGYFDFNRFHCHFSPRDWQRLINNNWGFRPKRLNFKLFNIQVKEVTQNDGTTTIANNLTSTVQVFTDSEYQLPYVLGSAHQGCLPPFPADVFMVPQYGYLTLNNGSQAVGRSSFYCLEYFPSQMLRTGNNFTFSYTFEDVPFHSSYAHSQSLDRLMNPLIDQYLYYLNRTQSNSGTLQQSRLLFSQAGPTSMSLQAKNWLPGPCYRQQRLSKQANDNNNSNFPWTAATKYHLNGRDSLVNPGPAMASHKDDEEKFFPMHGALIFGKQGTNANDADLEHVMITDEEEIRTTNPVATEQYGNVSNNLQNSNTGPTTENVNHQGALPGMVWQDRDVYLQGPIWAKIPHTDGHFHPSPLMGGFGLKHPPPQIMIKNTPVPANPPTNFSAAKFASFITQYSTGQVSVEIEWELQKENSKRWNPEIQYTSNYNKSVNVDFTVDTNGVYSEPRPIGTRYLTRNL

SEQ ID NO: 4201 - protein, 735 aa, Artificial Sequence
  source: /note="Description of Artificial Sequence: Synthetic polypeptide"
MAADGYLPDWLEDTLSEGIRQWWKLKPGPPPPKPAERHQDDSRGLVLPGYKYLGPFNGLDKGEPVNEADAAALEHDKAYDRQLDSGDNPYLKYNHADAEFQERLKEDTSFGGNLGRAVFQAKKRVLEPLGLVEEPVKTAPGKKRPVEHSPAEPDSSSGTGKAGQQPARKRLNFGQTGDADSVPDPQPLGQPPAAPTSLGSTTMATGSGAPMADNNEGADGVGNSSGNWHCDSQWLGDRVITTSTRTWALPTYNNHLYKQISSQSGASNDNHYFGYSTPWGYFDFNRFHCHFSPRDWQRLINNNWGFRPKRLNFKLFNIQVKEVTQNDGTTTIANNLTSTVQVFTDSEYQLPYVLGSAHQGCLPPFPADVFMVPQYGYLTLNNGSQAVGRSSFYCLEYFPSQMLRTGNNFTFSYTFEDVPFHSSYAHSQSLDRLMNPLIDQYLYYLNRTQSNSGTLQQSRLLFSQAGPTSMSLQAKNWLPGPCYRQQRLSKQANDNNNSNFPWTAATKYHLNGRDSLVNPGPAMASHKDDEEKFFPMHGTLIFGKQGTNANDADLEHAMITDEEEIRTTNPVATEQYGNVSNNLQNSNTGPTTENVNHQGALPGMVWQDRDVYLQGPIWAKIPHTDGHFHPSPLMGGFGLKHPPPQIMIKNTPVPANPPTNFSAAKFASFITQYSTGQVSVEIEWELQKENSKRWNPEIQYTSNYNKSVNVDFTVDTNGVYSEPRPIGTRYLTRNL

SEQ ID NO: 4202 - protein, 735 aa, Artificial Sequence
  source: /note="Description of Artificial Sequence: Synthetic polypeptide"
MAADGYLPDWLEDTLSEGIRQWWKLKPGPPPPKPAERHQDDSRGLVLPGYKYLGPFNGLDKGEPVNEADAAALEHDKAYDRQLDSGDNPYLKYNHADAEFQERLKEDTSFGGNLGRAVFQAKKRVLEPLGLVEEPVKTAPGKKRPVEHSPAEPDSSSGTGKAGQQPARKRLNFGQTGDADSVPDPQPLGQPPAAPTSLGSTTMATGSGAPMADNNEGADGVGNSSGNWHCDSQWLGDRVITTSTRTWALPTYNNHLYKQISSQSGASNDNHYFGYSTPWGYFDFNRFHCHFSPRDWQRLINNNWGFRPKRLNFKLFNIQVKEVTQNDGTTTIANNLTSTVQVFTDSEYQLPYVLGSAHQGCLPPFPADVFMVPQYGYLTLNNGSQAVGRSSFYCLEYFPSQMLRTGNNFTFSYTFEDVPFHSSYAHSQSLDRLMNPLIDQYLYYLNRTQSNSGTLQQSRLLFSQAGPTSMSLQAKNWLPGPCYRQQRLSKQANDNNNSNFPWTAATKYHLNGRDSLVNPGPAMASHKDDEEKFFPMHGTLIFGKQGTNANDADLEHVMITDEEEIRTTNPVATEQYGNVSNNLQNSNTGPTTENVNHQGALPGMVWQDRDVYLQGPIWAKIPHTDGHFHPSPLMGGFGLKHPPPQIMIKNTPVPANPPTNFSAAKFASFITQYSTGQVSVEIEWELQKENSKRWNPEIRYTSNYNKSVNVDFTVDTNGVYSEPRPIGTRYLTRNL

SEQ ID NO: 4203 - protein, 735 aa, Artificial Sequence
  source: /note="Description of Artificial Sequence: Synthetic polypeptide"
MAADGYLPDWLEDTLSEGIRQWWKLKPGPPPPKPAERHQDDSRGLVLPGYKYLGPFNGLDKGEPVNEADAAALEHDKAYDRQLDSGDNPYLKYNHADAEFQERLKEDTSFGGNLGRAVFQAKKRVLEPLGLVEEPVKTAPGKKRPVEHSPAEPDSSSGTGKAGQQPARKRLNFGQTGDADSVPDPQPLGQPPAAPTSLGSTTMATGSGAPMADNNEGADGVGNSSGNWHCDSQWLGDRVITTSTRTWALPTYNNHLYKQISSQSGASNDNHYFGYSTPWGYFDFNRFHCHFSPRDWQRLINNNWGFRPKRLNFKLFNIQVKEVTQNDGTTTIANNLTSTVQVFTDSEYQLPYVLGSAHQGCLPPFPADVFMVPQYGYLTLNNGSQAVGRSSFYCLEYFPSQMLRTGNNFTFSYTFEDVPFHSSYAHSQSLDRLMNPLIDQYLYYLNRTQSNSGTLQQSRLLFSQAGPTSMSLQAKNWLPGPCYRQQRLSKQANDNNNSNFPRTAATKYHLNGRDSLVNPGPAMASHKDDEEKFFPMHGTLIFGKQGTNANDADLEHVMITDEEEIRTTNPVATEQYGNVSNNLQNSNTGPTTENVNHQGALPGMVWQDRDVYLQGPIWAKIPHTDGHFHPSPLMGGFGLKHPPPQIMIKNTPVPANPPTNFSAAKFASFITQYSTGQVSVEIEWELQKENSKRWNPEIQYTSNYNKSVNVDFTVDTNGVYSEPRPIGTRYLTRNL

SEQ ID NO: 4204 - protein, 735 aa, Artificial Sequence
  source: /note="Description of Artificial Sequence: Synthetic polypeptide"
MAADGYLPDWLEDTLSEGIRQWWKLKPGPPPPKPAERHQDDSRGLVLPGYKYLGPFNGLDKGEPVNEADAAALEHDKAYDRQLDSGDNPYLKYNHADAEFQERLKEDTSFGGNLGRAVFQAKKRVLEPLGLVEEPVKTAPGKKRPVEHSPAEPDSSSGTGKAGQQPARKRLNFGQTGDADSVPDPQPLGQPPAAPTSLGSTTMATGSGAPMADNNEGADGVGNSSGNWHCDSQWLGDRVITTSTRTWALPTYNNHLYKQISSQSGASNDNHYFGYSTPWGYFDFNRFHCHFSPRDWQRLINNNWGFRPKRLNFKLFNIQVKEVTQNDGTTTIANNLTSTVQVFTDSEYQLPYVLGSAHQGCLPPFPADVFMVPQYGYLTLNNGSQAVGRSSFYCLEYFPSQMLRTGNNFTFSYTFEDVPFHSSYAHSQSLDRLMNPLIGQYLYYLNRTQSNSGTLQQSRLLFSQAGPTSMSLQAKNWLPGPCYRQQRLSKQANDNNNSNFPWTAATKYHLNGRDSLVNPGPAMASHKDDEEKFFPMHGTLIFGKQGTNANDADLEHVMITDEEEIRTTNPVATEQYGNVSNNLQNSNTGPTTENVNHQGALPGMVWQDRDVYLQGPIWAKIPHTDGHFHPSPLMGGFGLKHPPPQIMIKNTPVPANPPTNFSAAKFASFITQYSTGQVSVEIEWELQKENSKRWNPEIQYTSNYNKSVNVDFTVDTNGVYSEPRPIGTRYLTRNL

SEQ ID NO: 4205 - protein, 735 aa, Artificial Sequence
  source: /note="Description of Artificial Sequence: Synthetic polypeptide"
MAADGYLPDWLEDTLSEGIRQWWKLKPGPPPPKPAERHQDDSRGLVLPGYKYLGPFNGLDKGEPVNEADAAALEHDKAYDRQLDSGDNPYLKYNHADAEFQERLKEDTSFGGNLGRAVFQAKKRVLEPLGLVEEPVKTAPGKKRPVEHSPAEPDSSSGTGKAGQQPARKRLNFGQTGDADSVPDPQPLGQPPAAPTSLGSTTMATGSGAPMADNNEGADGVGNSSGNWHCDSQWLGDRVITTSTRTWALPTYNNHLYKQISSQSGASNDNHYFGYSTPWGYFDFNRFHCHFSPRDWQRLINNNWGFRPKRLNFKLFNIQVKEVTQNDGTTTIANNLTSTVQVFTDSEYQLPYVLGSAHQGCLPPFPADVFMVPQYGYLTLNNGSQAVGRSSFYCLEYFPSQMLRTGNNFTFSYTFEDVPFHSSYAHSQSLDRLMNPLIDQYLYYLNRTQSNSGTLQQSRLLFSQAGPTSMSLQAKNWLPGPCYRQQRLSKQANDNNNSNFPWTAATKYHLNGRDSLVNPGPAMASHKDDEEKFFPMHGTLIFGKQGTNANDADLEHVMITDEEEIRTTNPVATEQYGNVSNNLQNSNTGPTTENVNHQGALPGMVWQDRDVYLQGPIWAKIPHTDGHFHPSPLMGGFGLKHPPPQIMIKNTPVPANPPTNFSAAKFASFITQYSTGQVGVEIEWELQKENSKRWNPEIQYTSNYNKSVNVDFTVDTNGVYSEPRPIGTRYLTRNL

SEQ ID NO: 4206 - protein, 735 aa, Artificial Sequence
  source: /note="Description of Artificial Sequence: Synthetic polypeptide"
MAADGYLPDWLEDTLSEGIRQWWKLKPGPPPPKPAERHQDDSRGLVLPGYKYLGPFNGLDKGEPVNEADAAALEHDKAYDRQLDSGDNPYLKYNHADAEFQERLKEDTSFGGNLGRAVFQAKKRVLEPLGLVEEPVKTAPGKKRPVEHSPAEPDSSSGTGKAGQQPARKRLNFGQTGDADSVPDPQPLGQPPAAPTSLGSTTMATGSGAPMADNNEGADGVGNSSGNWHCDSQWLGDRAITTSTRTWALPTYNNHLYKQISSQSGASNDNHYFGYSTPWGYFDFNRFHCHFSPRDWQRLINNNWGFRPKRLNFKLFNIQVKEVTQNDGTTTIANNLTSTVQVFTDSEYQLPYVLGSAHQGCLPPFPADVFMVPQYGYLTLNNGSQAVGRSSFYCLEYFPSQMLRTGNNFTFSYTFEDVPFHSSYAHSQSLDRLMNPLIDQYLYYLNRTQSNSGTLQQSRLLFSQAGPTSMSLQAKNWLPGPCYRQQRLSKQANDNNNSNFPWTAATKYHLNGRDSLVNPGPAMASHKDDEEKFFPMHGTLIFGKQGTNANDADLEHVMITDEEEIRTTNPVATEQYGNVSNNLQNSNTGPTTENVNHQGALPGMVWQDRDVYLQGPIWAKIPHTDGHFHPSPLMGGFGLKHPPPQIMIKNTPVPANPPTNFSAAKFASFITQYSTGQVSVEIEWELQKENSKRWNPEIQYTSNYNKSVNVDFTVDTNGVYSEPRPIGTRYLTRNL

SEQ ID NO: 4207 - protein, 735 aa, Artificial Sequence
  source: /note="Description of Artificial Sequence: Synthetic polypeptide"
MAADGYLPDWLEDTLSEGIRQWWKLKPGPPPPKPAERHQDDSRGLVLPGYKYLGPFNGLDKGEPVNEADAAALEHDKAYDRQLDSGDNPYLKYNHADAEFQERLKEDTSFGGNLGRAVFQAKKRVLEPLGLVEEPVKTAPGKKRPVEHSPAEPDSSSGTGKAGQQPARKRLNFGQTGDAGSVPDPQPLGQPPAAPTSLGSTTMATGSGAPMADNNEGADGVGNSSGNWHCDSQWLGDRVITTSTRTWALPTYNNHLYKQISSQSGASNDNHYFGYSTPWGYFDFNRFHCHFSPRDWQRLINNNWGFRPKRLNFKLFNIQVKEVTQNDGTTTIANNLTSTVQVFTDSEYQLPYVLGSAHQGCLPPFPADVFMVPQYGYLTLNNGSQAVGRSSFYCLEYFPSQMLRTGNNFTFSYTFEDVPFHSSYAHSQSLDRLMNPLIDQYLYYLNRTQSNSGTLQQSRLLFSQAGPTSMSLQAKNWLPGPCYRQQRLSKQANDNNNSNFPWTAATKYHLNGRDSLVNPGPAMASHKDDEEKFFPMHGTLIFGKQGTNANDADLEHVMITDEEEIRTTNPVATEQYGNVSNNLQNSNTGPTTENVNHQGALPGMVWQDRDVYLQGPIWAKIPHTDGHFHPSPLMGGFGLKHPPPQIMIKNTPVPANPPTNFSAAKFASFITQYSTGQVSVEIEWELQKENSKRWNPEIQYTSNYNKSVNVDFTVDTNGVYSEPRPIGTRYLTRNL

SEQ ID NO: 4208 - protein, 735 aa, Artificial Sequence
  source: /note="Description of Artificial Sequence: Synthetic polypeptide"
MAADGYLPDWLEDTLSEGIRQWWKLKPGPPPPKPAERHQDDSRGLVLPGYKYLGPFNGLDKGEPVNEADAAALEHDKAYDRQLDSGDSPYLKYNHADAEFQERLKEDTSFGGNLGRAVFQAKKRVLEPLGLVEEPVKTAPGKKRPVEHSPAEPDSSSGTGKAGQQPARKRLNFGQTGDADSVPDPQPLGQPPAAPTSLGSTTMATGSGAPMADNNEGADGVGNSSGNWHCDSQWLGDRVITTSTRTWALPTYNNHLYKQISSQSGASNDNHYFGYSTPWGYFDFNRFHCHFSPRDWQRLINNNWGFRPKRLNFKLFNIQVKEVTQNDGTTTIANNLTSTVQVFTDSEYQLPYVLGSAHQGCLPPFPADVFMVPQYGYLTLNNGSQAVGRSSFYCLEYFPSQMLRTGNNFTFSYTFEDVPFHSSYAHSQSLDRLMNPLIDQYLYYLNRTQSNSGTLQQSRLLFSQAGPTSMSLQAKNWLPGPCYRQQRLSKQANDNNNSNFPWTAATKYHLNGRDSLVNPGPAMASHKDDEEKFFPMHGTLIFGKQGTNANDADLEHVMITDEEEIRTTNPVATEQYGNVSNNLQNSNTGPTTENVNHQGALPGMVWQDRDVYLQGPIWAKIPHTDGHFHPSPLMGGFGLKHPPPQIMIKNTPVPANPPTNFSAAKFASFITQYSTGQVSVEIEWELQKENSKRWNPEIQYTSNYNKSVNVDFTVDTNGVYSEPRPIGTRYLTRNL

SEQ ID NO: 4209 - protein, 735 aa, Artificial Sequence
  source: /note="Description of Artificial Sequence: Synthetic polypeptide"
MAADGYLPDWLEDTLSEGIRQWWKLKPGPPPPKPAERHQDDSRGLVLPGYKYLGPFNGLDKGEPVNEADAAALEHDKAYDRQLDSGDNPYLKYNHADAEFQERLKEDTSFGGNLGRAVFQAKKRVLEPLGLVEEPVKTAPGKKRPVEHSPAEPDSSSGTGKAGQQPARKRLNFGQTGDADSVPDPQPLGQPPAAPTSLGSTTMATGSGAPMADNNEGADGVGNSSGNWHCDSQWLGDRVITTSTRTWALPTYNNHLYKQISSQSGASNDNHYFGYSTPWGYFDFNRFHCHFSPRDWQRLINNNWGFRPKRLNFKLFNIQVKEVTQNDGTTTIANNLTSTVQVFTDSEYQLPYVLGSAHQGCLPPFPADVFMVPQYGYLTLNNGSQAVGRSSFYCLEYFPSQMLRTGNNFTFSYTFEDVPFHSSYAHSQSLDRLMNPLIDQYLYYLNRTQSNSGTLQQSRLLFSQAGPTSMSLQAKNWLPGPCYRQQRLSKQANDNNNSNFPWTAATKYHLNGRDSLVNPGPAMASHKDDEEKFFPMHGTLIFGKQGTNANDADLEHVMITDEEEIRTTNPVATEQYGNVSNNLQNSNTGPTTENVNHQGALPGMVWQDRDVYLQGPIWAKIPHTDGHFHPSPLMGGFGLKHPPPQIMIKNTPVPANPPTNFSAAKFASFITQYSTGQVSVEIEWELQKENSKRWNPEIQYTSNYNKSVNVDFTVDTNGVYSEPRPIGTRYLTRNP

SEQ ID NO: 4210 - protein, 735 aa, Artificial Sequence
  source: /note="Description of Artificial Sequence: Synthetic polypeptide"
MAADGYLPDWLEDTLSEGIRQWWKLKPGPPPPKPAERHQDDSRGLVLPGYKYLGPFNGLDKGEPVNEADAAALEHDKAYDRQLDSGDNPYLKYNHADAEFQERLKEDTSFGGNLGRAVFQAKKRVLEPLGLVEEPVKTAPGKKRPVEHSPAEPDSSSGTGKAGQQPARKRLNFGQTGDADSVPDPQPLGQPPAAPTSLGSTTMATGSGAPMADNNEGADGVGNSSGNWHCDSQWLGDRVITTSTRTWALPTYNNHLYKQISSQSGASNDNHYFGYSTPWGYFDFNRFHCHFSPRDWQRLINNNWGFRPKRLNFKLFNIQVKEVTQNDGTTTIANNLTSTVQVFTDSEYQLPYVLGSAHQGCLPPFPADVFMVPQYGYLTLNNGSQAVGRSSFYCLEYFPSQMLRTGNNFTFSYTFEDVPFHSSYAHSQSLDRLMNPLIDQYLYYLNRTQSNSGTLQQSRLLFSQAGPTSMSLQAKNWLPGPCYRQQRPSKQANDNNNSNFPWTAATKYHLNGRDSLVNPGPAMASHKDDEEKFFPMHGTLIFGKQGTNANDADLEHVMITDEEEIRTTNPVATEQYGNVSNNLQNSNTGPTTENVNHQGALPGMVWQDRDVYLQGPIWAKIPHTDGHFHPSPLMGGFGLKHPPPQIMIKNTPVPANPPTNFSAAKFASFITQYSTGQVSVEIEWELQKENSKRWNPEIQYTSNYNKSVNVDFTVDTNGVYSEPRPIGTRYLTRNL

SEQ ID NO: 4211 - protein, 735 aa, Artificial Sequence
  source: /note="Description of Artificial Sequence: Synthetic polypeptide"
MAADGYLPDWLEDTLSEGIRQWWKLKPGPPPPKPAERHQDDSRGLVLPGYKYLGPFNGLDKGEPVNEADAAALEHDKAYDRQLDSGDNPYLKYNHADAEFQERLKEDTSFGGNLGRAVFQAKKRVLEPLGLVEEPVKTAPGKKRPVEHSPAEPDSSSGTGKAGQQPARKRLNFSQTGDADSVPDPQPLGQPPAAPTSLGSTTMATGSGAPMADNNEGADGVGNSSGNWHCDSQWLGDRVITTSTRTWALPTYNNHLYKQISSQSGASNDNHYFGYSTPWGYFDFNRFHCHFSPRDWQRLINNNWGFRPKRLNFKLFNIQVKEVTQNDGTTTIANNLTSTVQVFTDSEYQLPYVLGSAHQGCLPPFPADVFMVPQYGYLTLNNGSQAVGRSSFYCLEYFPSQMLRTGNNFTFSYTFEDVPFHSSYAHSQSLDRLMNPLIDQYLYYLNRTQSNSGTLQQSRLLFSQAGPTSMSLQAKNWLPGPCYRQQRLSKQANDNNNSNFPWTAATKYHLNGRDSLVNPGPAMASHKDDEEKFFPMHGTLIFGKQGTNANDADLEHVMITDEEEIRTTNPVATEQYGNVSNNLQNSNTGPTTENVNHQGALPGMVWQDRDVYLQGPIWAKIPHTDGHFHPSPLMGGFGLKHPPPQIMIKNTPVPANPPTNFSAAKFASFITQYSTGQVSVEIEWELQKENSKRWNPEIQYTSNYNKSVNVDFTVDTNGVYSEPRPIGTRYLTRNL

SEQ ID NO: 4212 - protein, 735 aa, Artificial Sequence
  source: /note="Description of Artificial Sequence: Synthetic polypeptide"
MAADGYLPDWLEDTLSEGIRQWWKLKPGPPPPKPAERHQDDSRGLVLPGYKYLGPFNGLDKGEPVNEADAAALEHDKAYDRQLDSGDNPYLKYNHADAEFQERLKEDTSFGGNLGRAVFQAKKRVLEPLGLVEEPVKTAPGKKRPVEHSPAEPDSSSGTGKAGQQPARKRLNFGQTGDADSVPDPQPLGQPPAAPTSLGSTTMATGSGAPMADNNEGADGVGNSSGNWHCDSQWLGDRVITTSTRTWALPTYNNHLYKQISSQSGASNDNHYFGYSTPWGYFDFNRFHCHFSPRDWQRLINNNWGFRPKRLNFKLFNIQVKEVTQNDGTTTIANNLTSTVQVFTDSEYQLPYVLGSAHQGCLPPFPADVFMVPQYGYLTLNNGSQAVGRSSFYCLEYFPSQMLRTGNNFTFSYTFEDVPFHSSYAHSQSLDRLMNPLIDQYLYYLNRTQSNSGTLQQSRLLFSQAGPTSMSLQAKNWLPGPCYRQQRLSKQANDNNNSNFPWTAATKYHLNGRDSLVNPGPAMASHKDDEEKFFPMHGTLIFGKQGTNANDADLEHVMITDEEEIRTTNPVATEQYGNVSNNLQNSNTGPTTENVNHQGALPGMVWQDRDVYLQGPIWAKIPHTDGHFHPSPLMGGFGLKHPPPQIMIKNTPVPANPPTNFSAAKFASFITQYSTGQVSVEIEWEPQKENSKRWNPEIQYTSNYNKSVNVDFTVDTNGVYSEPRPIGTRYLTRNL

SEQ ID NO: 4213 - protein, 735 aa, Artificial Sequence
  source: /note="Description of Artificial Sequence: Synthetic polypeptide"
MAADGYLPDWLEDTLSEGIRQWWKLKPGPPPPKPAERHQDDSRGLVLPGYKYLGPFNGLDKGEPVNEADAAALEHDKAYDRQLDSGDNPYLKYNHADAEFQERLKEDTSFGGNLGRAVFQAKKRVLEPLGLVEEPVKTAPGKKRPVEHSPAEPDSSSGTGKAGQQPARKRLNFGQTGDADSVPDPQPLGQPPAAPTSLGSTTMATGSGAPMADNNEGADGVGNSSGNWHCDSQWLGDRVITTSTRTWALPTYNNHLYKQISSQSGASNDNHYFGYSTPWGYFDFNRFHCHFSPRDWQRLINNNWGFRPKRPNFKLFNIQVKEVTQNDGTTTIANNLTSTVQVFTDSEYQLPYVLGSAHQGCLPPFPADVFMVPQYGYLTLNNGSQAVGRSSFYCLEYFPSQMLRTGNNFTFSYTFEDVPFHSSYAHSQSLDRLMNPLIDQYLYYLNRTQSNSGTLQQSRLLFSQAGPTSMSLQAKNWLPGPCYRQQRLSKQANDNNNSNFPWTAATKYHLNGRDSLVNPGPAMASHKDDEEKFFPMHGTLIFGKQGTNANDADLEHVMITDEEEIRTTNPVATEQYGNVSNNLQNSNTGPTTENVNHQGALPGMVWQDRDVYLQGPIWAKIPHTDGHFHPSPLMGGFGLKHPPPQIMIKNTPVPANPPTNFSAAKFASFITQYSTGQVSVEIEWELQKENSKRWNPEIQYTSNYNKSVNVDFTVDTNGVYSEPRPIGTRYLTRNL

SEQ ID NO: 4214 - protein, 735 aa, Artificial Sequence
  source: /note="Description of Artificial Sequence: Synthetic polypeptide"
MAADGYLPDWLEDTLSEGIRQWWKLKPGPPPPKPAERHQDDSRGLVLPGYKYLGPFNGLDKGEPVNEADAAALEHDKAYDRQLDSGDNPYLKYNHADAEFQERLKEDTSFGGNLGRAVFQAKKRVLEPLGLVEEPVKTAPGKKRPVEHSPAEPDSSSGTGKAGQQPARKRLNFGQTGDADSVPDPQPLGQPPAAPTSLGSTTMATGSGAPMADNNEGADGVGNSSGNWHCDSQWLGDRVITTSTRTWALPTYNNHLYKQISSQSGASNDNHYFGYSTPWGYFDFNRFHCHFSPRDWQRLINNNWGFRPKRLNFKLFNIQVKEVTQNDGTTTIANNLTSTVQVFTDSEYQLPYVLGSAHQGCLPPFPADVFMVPQYGYLTLNNGSQAVGRSSFYCLEYFPSQMLRTGNNFTFSYTFEDVPFHSSYAHSQSLDRLMNPLIDQYLYYLNRTQSNSGTLQQSRLLFSQAGPTSMSLQAKNWLPGPCYRQQRLSKQANDNNNSNFPWTAATKYHLNGRDSLVNPGPAMASHKDDEEKFFPMHGTLIFGKQGTNANDADLEHVVITDEEEIRTTNPVATEQYGNVSNNLQNSNTGPTTENVNHQGALPGMVWQDRDVYLQGPIWAKIPHTDGHFHPSPLMGGFGLKHPPPQIMIKNTPVPANPPTNFSAAKFASFITQYSTGQVSVEIEWELQKENSKRWNPEIQYTSNYNKSVNVDFTVDTNGVYSEPRPIGTRYLTRNL

SEQ ID NO: 4215 - protein, 735 aa, Artificial Sequence
  source: /note="Description of Artificial Sequence: Synthetic polypeptide"
MAADGYLPDWLEDTLSEGIRQWWKLKPGPPPPKPAERHQDDSRGLVLPGYKYLGPFNGLDKGEPVNEADAAALEHDKAYDRQLDSGDNPYLKYNHADAEFQERLKEDTSFGGNLGRAVFQAKKRVLEPLGLVEEPVKTAPGKKRPVEHSPAEPDSSSGTGKAGQQPARKRLNFGQTGDADSVPDPQPLGQPPAAPTSLGSTTMATGSGAPMADNNEGADGVGNSSGNWHCDSQWLGDRVITTSTRTWALPTYNNHLYKQISSQSGASNDNHYFGYSTPWGYFDFNRFHCHFSPRDWQRLINNNWGFRPKRLNFKLFNIQVKEVTQNDGTTTIANNLTSTVQVFTDSEYQLPYVLGSAHQGCLPPFPADVFMVPQYGYLTLNNGSQAVGRSSFYCLEYFPSQMLRTGNNFTFSYTFEDVPFHSSYAHSQSLDRLMNPLIDQYLYYLNRTQSNSGTLQQSRLLFSQAGPTSMSLQAKNWLPGPCYRQQRLSKQANDNNNSNFPWTAATKYHLNGRDSLVNPGPAMASHKDDEEKFFPMHGTLIFGKQGTNANDADLEHVMITDEEEIRTTNPVATEQYGNVSNNLQNSNTGPTTENVNHQGALPGMVWRDRDVYLQGPIWAKIPHTDGHFHPSPLMGGFGLKHPPPQIMIKNTPVPANPPTNFSAAKFASFITQYSTGQVSVEIEWELQKENSKRWNPEIQYTSNYNKSVNVDFTVDTNGVYSEPRPIGTRYLTRNL

SEQ ID NO: 4216 - protein, 735 aa, Artificial Sequence
  source: /note="Description of Artificial Sequence: Synthetic polypeptide"
MAADGYLPDWLEDTLSEGIRQWWKLKPGPPPPKPAERHQDDSRGLVLPGYKYLGPFNGLDKGEPVNEADAAALEHDKAYDRQLDSGDNPYLKYNHADAEFQERLKEDTSFGGNLGRAVFQAKKRVLEPLGLVEEPVKTAPGKKRPVEHSPAEPDSSSGTGKAGQQPARKRLNFGQTGGADSVPDPQPLGQPPAAPTSLGSTTMATGSGAPMADNNEGADGVGNSSGNWHCDSQWLGDRVITTSTRTWALPTYNNHLYKQISSQSGASNDNHYFGYSTPWGYFDFNRFHCHFSPRDWQRLINNNWGFRPKRLNFKLFNIQVKEVTQNDGTTTIANNLTSTVQVFTDSEYQLPYVLGSAHQGCLPPFPADVFMVPQYGYLTLNNGSQAVGRSSFYCLEYFPSQMLRTGNNFTFSYTFEDVPFHSSYAHSQSLDRLMNPLIDQYLYYLNRTQSNSGTLQQSRLLFSQAGPTSMSLQAKNWLPGPCYRQQRLSKQANDNNNSNFPWTAATKYHLNGRDSLVNPGPAMASHKDDEEKFFPMHGTLIFGKQGTNANDADLEHVMITDEEEIRTTNPVATEQYGNVSNNLQNSNTGPTTENVNHQGALPGMVWQDRDVYLQGPIWAKIPHTDGHFHPSPLMGGFGLKHPPPQIMIKNTPVPANPPTNFSAAKFASFITQYSTGQVSVEIEWELQKENSKRWNPEIQYTSNYNKSVNVDFTVDTNGVYSEPRPIGTRYLTRNL

SEQ ID NO: 4217 - protein, 735 aa, Artificial Sequence
  source: /note="Description of Artificial Sequence: Synthetic polypeptide"
MAADGYLPDWLEDTLSEGIRQWWKLKPGPPPPKPAERHQDDSRGLVLPGYKYLGPFNGLDKGEPVNEADAAALEHDKAYDRQLDSGDNPYLKYNHADAEFQERLKEDTSFGGNLGRAVFQAKKRVLEPLGLVEEPVKTAPGKKRPVEHSPAEPDSSSGTGKAGQQPARKRLNFGQTGDADSVPDPQPLGQPPAAPTSLGSTTMATGSGAPMADNNEGTDGVGNSSGNWHCDSQWLGDRVITTSTRTWALPTYNNHLYKQISSQSGASNDNHYFGYSTPWGYFDFNRFHCHFSPRDWQRLINNNWGFRPKRLNFKLFNIQVKEVTQNDGTTTIANNLTSTVQVFTDSEYQLPYVLGSAHQGCLPPFPADVFMVPQYGYLTLNNGSQAVGRSSFYCLEYFPSQMLRTGNNFTFSYTFEDVPFHSSYAHSQSLDRLMNPLIDQYLYYLNRTQSNSGTLQQSRLLFSQAGPTSMSLQAKNWLPGPCYRQQRLSKQANDNNNSNFPWTAATKYHLNGRDSLVNPGPAMASHKDDEEKFFPMHGTLIFGKQGTNANDADLEHVMITDEEEIRTTNPVATEQYGNVSNNLQNSNTGPTTENVNHQGALPGMVWQDRDVYLQGPIWAKIPHTDGHFHPSPLMGGFGLKHPPPQIMIKNTPVPANPPTNFSAAKFASFITQYSTGQVSVEIEWELQKENSKRWNPEIQYTSNYNKSVNVDFTVDTNGVYSEPRPIGTRYLTRNL

SEQ ID NO: 4218 - protein, 735 aa, Artificial Sequence
  source: /note="Description of Artificial Sequence: Synthetic polypeptide"
MAADGYLPDWLEDTLSEGIRQWWKLKPGPPPPKPAERHQDDSRGLVLPGYKYLGPFNGLDKGEPVNEADAAALEHDKAYDRQLDSGDNPYPKYNHADAEFQERLKEDTSFGGNLGRAVFQAKKRVLEPLGLVEEPVKTAPGKKRPVEHSPAEPDSSSGTGKAGQQPARKRLNFGQTGDADSVPDPQPLGQPPAAPTSLGSTTMATGSGAPMADNNEGADGVGNSSGNWHCDSQWLGDRVITTSTRTWALPTYNNHLYKQISSQSGASNDNHYFGYSTPWGYFDFNRFHCHFSPRDWQRLINNNWGFRPKRLNFKLFNIQVKEVTQNDGTTTIANNLTSTVQVFTDSEYQLPYVLGSAHQGCLPPFPADVFMVPQYGYLTLNNGSQAVGRSSFYCLEYFPSQMLRTGNNFTFSYTFEDVPFHSSYAHSQSLDRLMNPLIDQYLYYLNRTQSNSGTLQQSRLLFSQAGPTSMSLQAKNWLPGPCYRQQRLSKQANDNNNSNFPWTAATKYHLNGRDSLVNPGPAMASHKDDEEKFFPMHGTLIFGKQGTNANDADLEHVMITDEEEIRTTNPVATEQYGNVSNNLQNSNTGPTTENVNHQGALPGMVWQDRDVYLQGPIWAKIPHTDGHFHPSPLMGGFGLKHPPPQIMIKNTPVPANPPTNFSAAKFASFITQYSTGQVSVEIEWELQKENSKRWNPEIQYTSNYNKSVNVDFTVDTNGVYSEPRPIGTRYLTRNL

SEQ ID NO: 4219 - protein, 735 aa, Artificial Sequence
  source: /note="Description of Artificial Sequence: Synthetic polypeptide"
MAADGYLPDWLEDTLSEGIRQWWKLKPGPPPPKPAERHQDDSRGLVLPGYKYLGPFNGLDKGEPVNEADAAALEHDKAYDRQLDSGDNPYLKYNHADAEFQERLKEDTSFGGNLGRAVFQAKKRVLEPLGLVEEPVKTAPGKKRPVEHSPAEPDSSSGTGKAGQQPARKRLNFGQTGDADSVPDPQPLGQPPAAPTSLGSTTMATGSGAPMADNNEGADGVGNSSGNWHCDSQWLGDRVITTSTRTWALPTYNNHLYKQISSQSGASNDNHYFGYSTPWGYFDFNRFHCHFSPRDWQRLINNNWGFRPKRLNFKLFNIQVKEVTQNDGTTTIANNLTSTVQVFTDSEYQLPYVLGSAHQGCLPPFPADVFMVPQYGYLTLNNGSQAVGRSSFYCLEYFPSQMLRTGNNFTFSYTFEDVPFHSSYAHSQSLDRLMNPLIDQYLYYLNRTQSNSGTLQQSRLLFSQAGPTSMSLQAKNWLPGPCYRQQRLSKQANDNNNSNFPWTAATKYHLNGRDSLVNPGPAMASHKDDEEKFFPMHGTLIFGKQGTNANDADLEHVMITDEEEIRATNPVATEQYGNVSNNLQNSNTGPTTENVNHQGALPGMVWQDRDVYLQGPIWAKIPHTDGHFHPSPLMGGFGLKHPPPQIMIKNTPVPANPPTNFSAAKFASFITQYSTGQVSVEIEWELQKENSKRWNPEIQYTSNYNKSVNVDFTVDTNGVYSEPRPIGTRYLTRNL

SEQ ID NO: 4220 - protein, 735 aa, Artificial Sequence
  source: /note="Description of Artificial Sequence: Synthetic polypeptide"
MAADGYLPDWLEDTLSEGIRQWWKLKPGPPPPKPAERHQDDSRGLVLPGYKYLGPFNGLDKGEPVNEADAAALEHDKAYDRQLDSGDNPYLKYNHADAEFQERLKEDTSFGGNLGRAVFQAKKRVLEPLGLVEEPVKTAPGKKRPVEHSPAEPDSSSGTGKAGQQPARKRLNFGQTGDADSVPDPQPLGQPPAAPTSLGSTTMATGSGAPMADNNEGADGVGNSSGNWHCDSQWLGDRVITTSTRTWALPTYNNHLYKQISSQSGASNDNHYFGYSTPWGYFDFNRFHCRFSPRDWQRLINNNWGFRPKRLNFKLFNIQVKEVTQNDGTTTIANNLTSTVQVFTDSEYQLPYVLGSAHQGCLPPFPADVFMVPQYGYLTLNNGSQAVGRSSFYCLEYFPSQMLRTGNNFTFSYTFEDVPFHSSYAHSQSLDRLMNPLIDQYLYYLNRTQSNSGTLQQSRLLFSQAGPTSMSLQAKNWLPGPCYRQQRLSKQANDNNNSNFPWTAATKYHLNGRDSLVNPGPAMASHKDDEEKFFPMHGTLIFGKQGTNANDADLEHVMITDEEEIRTTNPVATEQYGNVSNNLQNSNTGPTTENVNHQGALPGMVWQDRDVYLQGPIWAKIPHTDGHFHPSPLMGGFGLKHPPPQIMIKNTPVPANPPTNFSAAKFASFITQYSTGQVSVEIEWELQKENSKRWNPEIQYTSNYNKSVNVDFTVDTNGVYSEPRPIGTRYLTRNL

SEQ ID NO: 4221 - protein, 735 aa, Artificial Sequence
  source: /note="Description of Artificial Sequence: Synthetic polypeptide"
MAADGYLPDWLEDTLSEGIRQWWKLKPGPPPPKPAERHQDDSRGLVLPGYKYLGPFNGLDKGEPVNEADAAALEHDKAYDRQLDSGDNPYLKYNHADAEFQERLKEDTSFGGNLGRAVFQAKKRVLEPLGLVEEPVKTAPGKKRPVEHSPAEPDSSSGTGKAGQQPARKRLNFGQTGDADSVPDPQPLGQPPAAPTSLGSTTMATGSGAPMADNNEGADGVGNSSGNWHCDSQWLGDRVITTSTRTWALPTYNNHLYKQISSQSGASNDNHYFGYSTPWGYFDFNRFHCHFSPRDWQRLINNNWGFRPKRLNFKLFNIQVKEVTQNDGTTTIANNLTSTVQVFTDSEYQLPYVLGSAHQGCLPPFPADVFMVPQYGYLTLNNGSQAVGRSSFYCLEYFPSQMLRTGNNFTFSYTFEDVPFRSSYAHSQSLDRLMNPLIDQYLYYLNRTQSNSGTLQQSRLLFSQAGPTSMSLQAKNWLPGPCYRQQRLSKQANDNNNSNFPWTAATKYHLNGRDSLVNPGPAMASHKDDEEKFFPMHGTLIFGKQGTNANDADLEHVMITDEEEIRTTNPVATEQYGNVSNNLQNSNTGPTTENVNHQGALPGMVWQDRDVYLQGPIWAKIPHTDGHFHPSPLMGGFGLKHPPPQIMIKNTPVPANPPTNFSAAKFASFITQYSTGQVSVEIEWELQKENSKRWNPEIQYTSNYNKSVNVDFTVDTNGVYSEPRPIGTRYLTRNL

SEQ ID NO: 4222 - protein, 735 aa, Artificial Sequence
  source: /note="Description of Artificial Sequence: Synthetic polypeptide"
MAADGYLPDWLEDTLSEGIRQWWKLKPGPPPPKPAERHQDDSRGLVLPGYKYLGPFNGLDKGEPVNEADAAALEHDKAYDRQLDSGDNPYLKYNHADAEFQERLKEDTSFGGNLGRAVFQAKKRVLEPLGLVEEPVKTAPGKKRPVEHSPAEPDSSSGTGKAGQQPARKRLNFGQTGDADSVPDPQPLGQPPAAPTSLGSTTMATGSGAPMADNNEGADGVGNSSGNWHCDSQWLGDRVITTSTRTWALPTYSNHLYKQISSQSGASNDNHYFGYSTPWGYFDFNRFHCHFSPRDWQRLINNNWGFRPKRLNFKLFNIQVKEVTQNDGTTTIANNLTSTVQVFTDSEYQLPYVLGSAHQGCLPPFPADVFMVPQYGYLTLNNGSQAVGRSSFYCLEYFPSQMLRTGNNFTFSYTFEDVPFHSSYAHSQSLDRLMNPLIDQYLYYLNRTQSNSGTLQQSRLLFSQAGPTSMSLQAKNWLPGPCYRQQRLSKQANDNNNSNFPWTAATKYHLNGRDSLVNPGPAMASHKDDEEKFFPMHGTLIFGKQGTNANDADLEHVMITDEEEIRTTNPVATEQYGNVSNNLQNSNTGPTTENVNHQGALPGMVWQDRDVYLQGPIWAKIPHTDGHFHPSPLMGGFGLKHPPPQIMIKNTPVPANPPTNFSAAKFASFITQYSTGQVSVEIEWELQKENSKRWNPEIQYTSNYNKSVNVDFTVDTNGVYSEPRPIGTRYLTRNL

SEQ ID NO: 4223 - protein, 735 aa, Artificial Sequence
  source: /note="Description of Artificial Sequence: Synthetic polypeptide"
MAADGYLPDWLEDTLSEGIRQWWKLKPGPPPPKPAERHQDDSRGLVLPGYKYLGPFNGLDKGEPVNEADAAALEHDKAYDRQLDSGDNPYLKYNHADAEFQERLKEDTSFGGNLGRAVFQAKKRVLEPLGLVEEPVKTAPGKKRPVEHSPAEPDSSSGTGKAGQQPARKRLNFGQTGDADSVPDPQPLGQPPAAPTSLGSTTMATGSGAPMADNNEGADGVGNSSGNWHCDSQWLGDRVITTSTRTWALPTYNNHLYKQISSQSGASNDNHYFGYSTPWGYFDFNRFHCHFSPRDWQRLINNNWGFRPKRLNFKPFNIQVKEVTQNDGTTTIANNLTSTVQVFTDSEYQLPYVLGSAHQGCLPPFPADVFMVPQYGYLTLNNGSQAVGRSSFYCLEYFPSQMLRTGNNFTFSYTFEDVPFHSSYAHSQSLDRLMNPLIDQYLYYLNRTQSNSGTLQQSRLLFSQAGPTSMSLQAKNWLPGPCYRQQRLSKQANDNNNSNFPWTAATKYHLNGRDSLVNPGPAMASHKDDEEKFFPMHGTLIFGKQGTNANDADLEHVMITDEEEIRTTNPVATEQYGNVSNNLQNSNTGPTTENVNHQGALPGMVWQDRDVYLQGPIWAKIPHTDGHFHPSPLMGGFGLKHPPPQIMIKNTPVPANPPTNFSAAKFASFITQYSTGQVSVEIEWELQKENSKRWNPEIQYTSNYNKSVNVDFTVDTNGVYSEPRPIGTRYLTRNL

SEQ ID NO: 4224 - protein, 735 aa, Artificial Sequence
  source: /note="Description of Artificial Sequence: Synthetic polypeptide"
MAADGYLPDWLEDTLSEGIRQWWKLKPGPPPPKPAERHQDDSRGLVLPGYKYLGPFNGLDKGEPVNEADAAALEHDKAYDRQLDSGDNPYLKYNHADAEFQERLKEDTSFGGNLGRAVFQAKKRVLEPLGLVEEPVKTAPGKKRPVEHSPAEPDSSSGTGKAGQQPARKRLNFGQTGDADSVPDPQPLGQPPAAPTSLGSTTMATGSGAPMADNNEGADGVGNSSGNWHCDSQWLGDRVITTSTRTWALPTYNNHLYKQISSQSGASNGNHYFGYSTPWGYFDFNRFHCHFSPRDWQRLINNNWGFRPKRLNFKLFNIQVKEVTQNDGTTTIANNLTSTVQVFTDSEYQLPYVLGSAHQGCLPPFPADVFMVPQYGYLTLNNGSQAVGRSSFYCLEYFPSQMLRTGNNFTFSYTFEDVPFHSSYAHSQSLDRLMNPLIDQYLYYLNRTQSNSGTLQQSRLLFSQAGPTSMSLQAKNWLPGPCYRQQRLSKQANDNNNSNFPWTAATKYHLNGRDSLVNPGPAMASHKDDEEKFFPMHGTLIFGKQGTNANDADLEHVMITDEEEIRTTNPVATEQYGNVSNNLQNSNTGPTTENVNHQGALPGMVWQDRDVYLQGPIWAKIPHTDGHFHPSPLMGGFGLKHPPPQIMIKNTPVPANPPTNFSAAKFASFITQYSTGQVSVEIEWELQKENSKRWNPEIQYTSNYNKSVNVDFTVDTNGVYSEPRPIGTRYLTRNL

SEQ ID NO: 4225 - protein, 735 aa, Artificial Sequence
  source: /note="Description of Artificial Sequence: Synthetic polypeptide"
MAADGYLPDWLEDTLSEGIRQWWKLKPGPPPPKPAERHQDDSRGLVLPGYKYLGPFNGLDKGEPVNEADAAALEHDKAYDRQLDSGDNPYLKYNHADAEFQERLKEDTSFGGNLGRAVFQAKKRVLEPLGLVEEPVKTAPGKKRPVEHSPAEPDSSSGTGKAGQQPARKRLNFGQTGDADSVPDPQPLGQPPAAPTSLGSTTMATGSGAPMADNNEGADGVGNSSGNWHCDSQWLGDRVITTSTRTWALPTYNNHLYKQISSQSGASNDNHYFGYSTPWGYFDFNRFHCHFSPRDWQRLINNNWGFRPKRLNFKLFNIQVKEVTQNDGTTTIANNLTSTVQVFTDSEYQLPYVLGSAHQGCLPPFPADVFMVPQYGYLTLNNGSQAVGRSSFYCLEYFPSQMLRTGNNFTFSYTFEDVPFHSSYAHSQSLDRLMNPLIDQYLYYLNRTQSNSGTLQQSRLLFSQAGPTSMSLQAKNWLPGPCYRQQRLSKQANDNNNSNFPWTAATKYHLNGRDSLVNPGPAMASHKDDEEKFFPMHGTLIFGKQGTNANDADLEHVMITDEEEIRTANPVATEQYGNVSNNLQNSNTGPTTENVNHQGALPGMVWQDRDVYLQGPIWAKIPHTDGHFHPSPLMGGFGLKHPPPQIMIKNTPVPANPPTNFSAAKFASFITQYSTGQVSVEIEWELQKENSKRWNPEIQYTSNYNKSVNVDFTVDTNGVYSEPRPIGTRYLTRNL

SEQ ID NO: 4226 - protein, 735 aa, Artificial Sequence
  source: /note="Description of Artificial Sequence: Synthetic polypeptide"
MAADGYLPDWLEDTLSEGIRQWWKLKPGPPPPKPAERHQDDSRGLVLPGYKYLGPFNGLDKGEPVNEADAAALEHDKAYDRQLDSGDNPYLKYNHADAEFQERLKEDTSFGGNLGRAVFQAKKRVLEPLGLVEEPVKTAPGKKRPVEHSPAEPDSSSGTGKAGQQPARKRLNFGQTGDADSVPDPQPLGQPPAAPTSLGSTTMATGSGAPMADNNEGADGVGNSSGNWHCDSQWLGDRVITTSTRTWALPTYNNHLYKQISSQSGASNDNHYFGYSTPWGYFDFNRFHCHFSPRDWQRLINNNWGFRPKRLNFKLFNIQVKEVTQNDGTTTIANNLTSTVQVFTDSEYQLPYVLGSAHQGCLPPFPADVFMVPQYGYLTLNNGSQAVGRSSFYCLEYFPSQMLRTGNNFTFSYTFEGVPFHSSYAHSQSLDRLMNPLIDQYLYYLNRTQSNSGTLQQSRLLFSQAGPTSMSLQAKNWLPGPCYRQQRLSKQANDNNNSNFPWTAATKYHLNGRDSLVNPGPAMASHKDDEEKFFPMHGTLIFGKQGTNANDADLEHVMITDEEEIRTTNPVATEQYGNVSNNLQNSNTGPTTENVNHQGALPGMVWQDRDVYLQGPIWAKIPHTDGHFHPSPLMGGFGLKHPPPQIMIKNTPVPANPPTNFSAAKFASFITQYSTGQVSVEIEWELQKENSKRWNPEIQYTSNYNKSVNVDFTVDTNGVYSEPRPIGTRYLTRNL

SEQ ID NO: 4227 - protein, 735 aa, Artificial Sequence
  source: /note="Description of Artificial Sequence: Synthetic polypeptide"
MAADGYLPDWLEDTLSEGIRQWWKLKPGPPPPKPAERHQDDSRGLVLPGYKYLGPFNGLDKGEPVNEADAAALEHDKAYDRQLDSGDNPYLKYNHADAEFQERLKEDTSFGGNLGRAVFQAKKRVLEPLGLVEEPVKTAPGKKRPVEHSPAEPDSSSGTGKAGQQPARKRLNFGQTGDADSVPDPQPLGQPPAAPTSLGSTTMATGSGAPMADNNEGADGVGNSSGNWHCDSQWLGDRVITTSTRTWALPTYNNHLYKQISSQSGASNDNHYFGYSTPWGYFDFNRFHCHFSPRDWQRLINNNWGFRPKRLNFKLFNIQVKEVTQNDGTTTIANNLTSTVQVFTDSEYQLPYVLGSAHQGCLPPFPADVFMVPQYGYLTLNNGSQAVGRSSFYCLEYFPSQMLRTGNNFTFSYTFEDVPFHSSYAHSQSLDRLMNPLIDQYLYYLNRTQSNSGTLQQSRLLFSQAGPTSMSLQAKNWLPGPCYRQQRLSKQANDNNNSNFPWTAATKYHLNGRDSLVNPGPAMASHKDDEEKFFPMHGTLIFGKQGTNANDADLEHVMITDEEEIRTTNPVATEQYGNVSNNLQNSNTGPTTENVNHQGALPGMVWQDRDVYLQGPIWAKIPHTDGHFHPSPLMGGFGLKHPPPQIMIKNTPVPANPPTNFSAAKFASFITQYSTGQVSVEIEWELQKENSKRWNPEIQYTSNYSKSVNVDFTVDTNGVYSEPRPIGTRYLTRNL

SEQ ID NO: 4228 - protein, 735 aa, Artificial Sequence
  source: /note="Description of Artificial Sequence: Synthetic polypeptide"
MAADGYLPDWLEDTLSEGIRQWWRLKPGPPPPKPAERHQDDSRGLVLPGYKYLGPFNGLDKGEPVNEADAAALEHDKAYDRQLDSGDNPYLKYNHADAEFQERLKEDTSFGGNLGRAVFQAKKRVLEPLGLVEEPVKTAPGKKRPVEHSPAEPDSSSGTGKAGQQPARKRLNFGQTGDADSVPDPQPLGQPPAAPTSLGSTTMATGSGAPMADNNEGADGVGNSSGNWHCDSQWLGDRVITTSTRTWALPTYNNHLYKQISSQSGASNDNHYFGYSTPWGYFDFNRFHCHFSPRDWQRLINNNWGFRPKRLNFKLFNIQVKEVTQNDGTTTIANNLTSTVQVFTDSEYQLPYVLGSAHQGCLPPFPADVFMVPQYGYLTLNNGSQAVGRSSFYCLEYFPSQMLRTGNNFTFSYTFEDVPFHSSYAHSQSLDRLMNPLIDQYLYYLNRTQSNSGTLQQSRLLFSQAGPTSMSLQAKNWLPGPCYRQQRLSKQANDNNNSNFPWTAATKYHLNGRDSLVNPGPAMASHKDDEEKFFPMHGTLIFGKQGTNANDADLEHVMITDEEEIRTTNPVATEQYGNVSNNLQNSNTGPTTENVNHQGALPGMVWQDRDVYLQGPIWAKIPHTDGHFHPSPLMGGFGLKHPPPQIMIKNTPVPANPPTNFSAAKFASFITQYSTGQVSVEIEWELQKENSKRWNPEIQYTSNYNKSVNVDFTVDTNGVYSEPRPIGTRYLTRNL

SEQ ID NO: 4229 - protein, 735 aa, Artificial Sequence
  source: /note="Description of Artificial Sequence: Synthetic polypeptide"
MAADGYLPDWLEDTLSEGIRQWWKLKPGPPPPKPAERHKDDSRGLVLPGYKYLGPFNGLDKGEPVNEADAAALEHDKAYDRQLDSGDNPYLKYNHADAEFQERLKEDTSFGGNLGRAVFQAKKRVLEPLGLVEEPVKTAPGKKRPVEHSPVEPDSSSGTGKAGQQPARKRLNFGQTGDADSVPDPQPLGQPPAAPTSLGSTTMATGSGAPMADNNEGADGVGNSSGNWHCDSQWLGDRVITTSTRTWALPTYNNHLYKQISSQSGASNDNHYFGHSTPWGYFDFNRFHCHFSPRDWQRLINNNWGFRPKRLNFKLFNIQVKEVTQNDGTTTIANNLTSTVQVFTDSEYQLPYVLGSAHQGCLPPFPADVFMVPQYGYLTLNNGSQAVGRSSFYCLEYFPSQMLRTGNNFTFSYTFEDVPFHSSYAHSQSLDRLMNPLIDQYLYYLNKTQSNSGTLQQSRLLFSQAGPTSMSLQAKNWLPGPCYRQQRLSKQANDNNNSNFPWTAATKYHLNGRDSLVNPGPAMASHKDDEEKFFPMHGTLIFGKQGTNANDADLDNVMITDEEEIRTTNPVATEQYGTVSNNLQNSNTGPTTGTVNHQGALPGMVWQDRDVYLQGPIWAKIPHTDGHFHPSPLMGGFGLKHPPPQIMIKNTPVPANPPTNFSSAKSASFITQYSTGQVSVEIEWELQKENSKRWNPEIQYTSNYNKSVNVDFTVDTNGVYSEPRPIGTRYLTRNL

SEQ ID NO: 4230 - protein, 735 aa, Artificial Sequence
  source: /note="Description of Artificial Sequence: Synthetic polypeptide"
MAADGYLPDWLEDTLSEGIRQWWKLKPGPPPPKPAERHKDDSRGLVLPGYKYLGPFNGLDKGEPVNEADAAALEHDKAYDRQLDSGDNPYLKYNHADAEFQERLKEDTSFGGNLGRAVFQAKKRVLEPLGLVEEPVKTAPGKKRPVEHSPVEPDSSSGTGKAGQQPARKRLNFGQTGDADSVPDPQPLGQPPAAPSGLGTNTMATGSGAPMADNNEGADGVGNSSGNWHCDSTWMGDRVITTSTRTWALPTYNNHLYKQISSQSGASNDNHYFGYSTPWGYFDFNRFHCHFSPRDWQRLINNNWGFRPKRLNFKLFNIQVKEVTQNDGTTTIANNLTSTVQVFTDSEYQLPYVLGSAHQGCLPPFPADVFMVPQYGYLTLNNGSQAVGRSSFYCLEYFPSQMLRTGNNFTFSYTFEDVPFHSSYAHSQSLDRLMNPLIDQYLYYLNKTQSNSGTLQQSRLLFSQAGPTSMSLQAKNWLPGPCYRQQRLSKQANDNNNSNFPWTAATKYHLNGRDSLVNPGPAMASHKDDEEKFFPMHGTLIFGKQGTNANDADLDNVMITDEEEIRTTNPVATEQYGTVSNNLQNSNTGPTTGTVNHQGALPGMVWQDRDVYLQGPIWAKIPHTDGHFHPSPLMGGFGLKHPPPQIMIKNTPVPANPPTNFSSAKFASFITQYSTGQVSVEIEWELQKENSKRWNPEIQYTSNYNKSVNVDFTVDTNGVYSEPRPIGTRYLTRNL

SEQ ID NO: 4231 - protein, 735 aa, Artificial Sequence
  source: /note="Description of Artificial Sequence: Synthetic polypeptide"
MAADGYLPDWLEDTLPEGIRQWWKLKPGPPPPKPAERHKDDSRGLVLPGYKYLGPFNGLDKGEPVNEADAAALEHDKAYDRQLDSGDNPYLKYNHADAEFQERLKEDTSFGGNLGRAVFQAKKRVLEPLGLVEEPVKTAPGKKRPVEHSPVEPDSSSGTGKAGQQPARKRLNFGQTGDADSVPDPQPLGQPPAAPTSLGSTTMATGSGAPMADNNEGADGVGNSSGNWHCDSQWLGDRVITTSTRTWALPTYNNHLYKQISSQSGASNDNHYFGHSTPWGYFDFNRFHCHFSPRDWQRLINNNWGFRPKRLNFKLFNIQVKEVTQNDGTTTIANNLTSTVQVFTDSEYQLPYVLGSAHQGCLPPFPADVFMVPQYGYLTLNNGSQAVGRSSFYCLEYFPSQMLRTGNNFTFSYTFEDVPFHSSYAHSQSLDRLMNPLIDQYLYYLNKTQSNSGTLQQSRLLFSQAGPTSMSLQAKNWLPGPCYRQQRLSKQANDNNNSNFPWTAATKYHLNGRDSLVNPGPAMASHKDDEEKFFPMHGTLIFGKQGTNANDADLDNVMITDEEEIRTTNPVATEQYGTVSNNLQNSNTGPTTGTVNHQGALPGMVWQDRDVYLQGPIWAKIPHTDGHFHPSPLMGGFGLKHPPPQIMIKNTPVPANPPTNFSSAKFASFITQYSTGQVSVEIEWELQKENSKRWNPEIQYTSNYNKSVNVDFTVDTNGVYSEPRPIGTRYLTRNL

SEQ ID NO: 4232 - protein, 735 aa, Artificial Sequence
  source: /note="Description of Artificial Sequence: Synthetic polypeptide"
MAADGYLPDWLEDTLSEGIRQWWKLKPGPPPPKPAERHKDDSRGLVLPGYKYLGPFNGLDKGEPVNEADAAALEHDKAYDRQLDSGDNPYLKYNHADAEFQERLKEDTSFGGNLGRAVFQAKKRVLEPLGLVEEPVKTAPGKKRPVEHSPVEPDSSSGTGKAGQQPARKRLNFGQTGDADSVPDPQPLGQTPAAPTSLGSTTMATGSGAPMADNNEGADGVGNSSGNWHCDSQWLGDRVITTSTRTWALPTYNNHLYKQISSQSGASNDNHYFGYSTPWGYFDFNRFHCHFSPRDWQRLINNNWGFRPKRLNFKLFNIQVKEVTQNDGTTTIANNLTSTVQVFTDSEYQLPYVLGSAHQGCLPPFPADVFMVPQYGYLTLNNGSQAVGRSSFYCLEYFPSQMLRTGNNFTFSYTFEDVPFHSSYAHSQSLDRLMNPLIDQYLYYLNKTQSNSGTLQQSRLLFSQAGPTSMSLQAKNWLPGPCYRQQRLSKQANDNNNSNFPWTAATKYHLNGRDSLVNPGPAMASHKDDEEKFFPMHGTLIFGKQGTNANDADLDNVMITDEEEIRTTNPVATEQYGTVSNNLQNSNTGPTTGTVNHQGALPGMVWQDRDVYLQGPIWAKIPHTDGHFHPSPLMGGFGLKHPPPQIMIKNTPVPANPPTNFSSAKFASFITQYSTGQVGVEIEWELQKENSKRWNPEIQYTSNYNKSVNVDFTVDTNGVYSEPRPIGTRYLTRNL

SEQ ID NO: 4233 - protein, 735 aa, Artificial Sequence
  source: /note="Description of Artificial Sequence: Synthetic polypeptide"
MAADGYLPDWLEDTLSEGIRQWWKLKPGPPPPKPAERHKDDSRGLVLPGYKYLGPFNGLDKGEPVNEADAAALEHDKAYDRQLDSGDNPYLKYNHADAEFQERLKEDTSFGGNLGRAVFQAKKRVLEPLGLVEEPVKTAPGKKRPVEHSPVEPDSSSGTGKAGQQPARKRLNFGQTGDADSVPDPQPLGQTPAAPTSLGSTTMATGSGAPMADNNEGADGVGNSSGNWHCDSQWLGDRVITTSTRTWALPTYNNHLYKQISSQSGASNDNHYFGYSTPWGYFDFNRFHCHFSPRDWQRLINNNWGFRPKRLNFKLFNIQVKEVTQNDGTTTIANNLTSTVQVFTDSEYQLPYVLGSAHQGCLPPFPADVFMVPQYGYLTLNNGSQAVGRSSFYCLEYFPSQMLRTGNNFTFSYTFEDVPFHSSYAHSQSLDRLMNPLIDQYLYYLNKTQSNSGTLQQSRLLFSQAGPTSMSLQAKNWLPGPCYRQQRLSKQANDNNNSNFPWTAATKYHLNGRDSLVNPGPAMASHKDDEEKFFPMHGTLIFGKQGTNANDADLDNVMITDEEEIRTTNPVATEQYGTVSNNLQNSNTGPTTGTVNHQGALPGMVWQDRDVYLQGPIWAKIPHTDGHFHPSPLMGGFGLKHPPPQIMIKNTPVPANPPTNFSSAKFASFITQYSTGQVSVEIEWELQKENSKRWNPEIQYTSNYNKSVNVDFTVDTNGVYSEPRPIGTRYLTRNL

SEQ ID NO: 4234 - protein, 735 aa, Artificial Sequence
  source: /note="Description of Artificial Sequence: Synthetic polypeptide"
MAADGYLPDWLEDTLSEGIRQWWKLKPGPPPPKPAERHKDDSRGLVLPGYKYLGPFNGLDKGEPVNEADAAALEHDKAYDRQLDSGDNPYLKYNHADAEFQERLKEDTSFGGNLGRAVFQAKKRVLEPLGLVEEPVKTAPGKKRPVEHSPVEPDSSSGTGKAGQQPARKRLNFGQTGDADSVPDPQPLGQPPAAPTSLGSTTMATGSGAPMADNNEGADGVGNSSGNRHCDSQWLGDRVITTSTRTWALPTYNNHLYKQISSQSGASNDNHYFGHSTPWGYFDFNRFHCHFSPRDWQRLINNNWGFRPKRLNFKLFNIQVKEVTQNDGTTTIANNLTSTVQVFTDSEYQLPYVLGSAHQGCLPPFPADVFMVPQYGYLTLNNGSQAVGRSSFYCLEYFPSQMLRTGNNFTFSYTFEDVPFHSSYAHSQSLDRLMNPLIDQYLYYLNKTQSNSGTLQQSRLLFSQAGPTSMSLQAKNWLPGPCYRQQRLSKQANDNNNSNFPWTAATKYHLNGRDSLVNPGPAMASHKDDEEKFFPMHGTLIFGKQGTNANDADLDNVMITDEEEIRTTNPVATEQYGTVSNNLQNSNTGPTTGTVNHQGALPGMVWQDRDVYLQGPIWAKIPHTDGHFHPSPLMGGFGLKHPPPQIMIKNTPVPANPPTNFSSAKFASFITQYSTGQVSVEIEWELQKENSKRWNPEIQYTSNYNKSVNVDFTVDTNGVYSEPRPIGTRYLTRNL

SEQ ID NO: 4235 - protein, 735 aa, Artificial Sequence
  source: /note="Description of Artificial Sequence: Synthetic polypeptide"
MAADGYLPDWLEDTLSEGIRQWWKLKPGPPPPKPAERHKDDSRGLVLPGYKYLGPFNGLDKGEPVNEADAAALEHDKAYDRQLDSGDNPYLKYNHADAEFQERLKEDTSFGGNLGRAVFQAKKRVLEPLGLVEEPVKTAPGKKRPVEHSPVEPDSSSGTGKAGQQPARKRLNFGQTGDADSVPDPQPLGQPPAAPTSLGSTTMATGSGAPMADNNEGADGVGNSSGNWHCDSQWLGDRVITTSTRTWALPTYNNHLYKQISSQSGASNDNHYFGYSTPWGYFDFNRFHCHFSPRDWQRLINNNWGFRPKRLNFKLFNIQVKEVTQNDGTTTIANNLTSTVQVFTDSEYQLPYVLGSAHQGCLPPFPADVFMVPQYGYLTLNNGSQAVGRSSFYCLEYFPSQMPRTGNNFTFSYTFEDVPFHSSYAHSQSLDRLMNPLIDQYLYYLNKTQSNSGTLQQSRLLFSQAGPTSMSLQAKNWLPGPCYRQQRLSKQANDNNNSNFPWTAATKYHLNGRDSLVNPGPAMASHKDDEEKFFPMHGTLIFGKQGTNANDADLDNVMITDEEEIRTTNPVATEQYGTVSNNLQNSNTGPTTGTVNHQGALPGMVWQDRDVYLQGPIWAKIPHTDGHFHPSPLMGGFGLKHPPPQIMIKNTPVPANPPTNFSSAKFASFITQYSTGQVSVEIEWELQKENSKRWNPEIQYTSNYNKSVNVDFTVDTNGVYSEPRPIGTRYLTRNL

SEQ ID NO: 4236 - protein, 735 aa, Artificial Sequence
  source: /note="Description of Artificial Sequence: Synthetic polypeptide"
MAADGYLPDWLEDTLSEGIRQWWKLKPGPPPPKPAERHKDDSRGLVLPGYKYLGPFNGLDKGEPVNEADAAALEHDKAYDRQLDSGDNPYLKYNHADAEFQERLKEDTSFGGNLGRAVFQAKKRVLEPLGLVEEPVKTAPGKKRPVEHSPVEPDSSSGTGKAGQQPARKRLNFGQTGDADSVPDPQPLGQPPAAPTSLGSTTMATGSGAPMADNNEGADGVGNSSGNWHCDSQWLGDRVITTSTRTWALPTYNNHLYKQISSQSGASNDNHYFGYSTPWGYFDFNRFHCHFSPRDWQRLINNNWGFRPKRLNFKLFNIQVKEVTQNDGTTTIANNLTSTVQVFTDSEYQLPYVLGSAHQGCLPPFPADVFMVPQYGYLTLNNGSQAVGRSSFYCLEYFPSQMLRTGNNFTFSYTFEDVPFHSSYAHSQSLDRLMNPLIDQYLYYLNKTQSNSGTLQQSRLLFSQAGPTSMSLQAKNWLPGPCYRQQRLSKQANDNNNSNFPWTAATKYHLNGRDSLVNPGPAMASHKDDEEKFFPMHGTLIFGKQGTNANDADLDNVMITDEEEIRTTNPVATEQYGTVSNNLQNSNTGPTTGTVNHQGALPGMVWQDRDVYLQGPIWAKIPHTDGHFHPSPLMGGFGLKHPPPQIMIKNTPVPANPPTNFSSAKSASFITQYSTGQVSVEIEWELQKENSKRWNPEIQYTSNYNKSVNVDFTVDTNGVYSEPRPIGTRYLTRNL

SEQ ID NO: 4237 - protein, 735 aa, Artificial Sequence
  source: /note="Description of Artificial Sequence: Synthetic polypeptide"
MAADGYLPDWLEDTLSEGIRQWWKLKPGPPPPKPAERHKDDSRGLVLPGYKYLGPFNGLDKGEPVNEADAAALEHDKAYDRQLDSGDNPYLKYNHADAEFQERLKEDTSFGGNLGRAVFQAKKRVLEPLGLVEEPVKTAPGKKRPVEHSPVEPDSSSGTGKAGQQPARKRLNFGQTGDADSVPDPQPLGQPPAAPTSLGSTTMATGSGAPMADNNEGADGVGNSSGNWHCDSQWLGDRVITTSTRTWALPTYNNHLYKQISSQSGASNDNHYFGHSTPWGYFDFNRFHCHFSPRDWQRLINNNWGFRPKRLNFKLFNIQVKEVTQNDGTTTIANNLTSTVQVFTDSEYQLPYVLGSAHQGCLPPFPADVFMVPQYGYLTLNNGSQAVGRSSFYCLEYFPSQMLRTGNNFTFSYTFEDAPFHSSYAHSQSLDRLMNPLIDQYLYYLNKTNNQSGTFTQSRLLFSQAGPTSILFKSKNWLPGPCYRQQRLSKTANDNNNSNFPWTAATKYHLNGRDSLVNPGPAMASHKDDEEKFFPQHGTLIFGKQGTKLTDADLDNVMITDEEEIRTTNPVATEQYGTVSNNLQKLNILATTGTVNTQGALPGMVWQDRDVYLQGPIWAKIPHTDGHFHPSPLMGGFGLKHPPPQIMIKNTPVPANPPTNFSSAKFASFITQYSTGQVSVEIEWELQKENSKRWNPEIQYTSNYNKSVNVDFTVDTNGVYSEPRPIGTRYLTRNL

SEQ ID NO: 4238 - protein, 735 aa, Artificial Sequence
  source: /note="Description of Artificial Sequence: Synthetic polypeptide"
MAADGYLPDWLEDTLSEGIRQWWKLKPGPPPPKPAERHKDASRGLVLPGYKYLGPFNGLDKGEPVNEADAAALEHDKAYDRQLDSGDNPYLKYNHADAEFQERLKEDTSFGGNLGRAVFQAKKRVLEPLGLVEEPVKTAPGKKRPVEHSPVEPDSSSGTGKAGQQPARKRLNFGQTGDADSVPDPQPLGQPPAAPTSLGSTTMATGSGAPMADNNEGADGVGNSSGNWHCDSQWLGDRVITTSTRTWALPTYNNHLYKQISSQSGASNDNHYFGYSTPWGYFDFNRFHCHFSPRDWQRLINNNWGFRPKRLNFKLFNIQVKEVTQNDGTTTIANNLTSTVQVFTDSEYQLPYVLGSAHQGCLPPFPADVFMVPQYGYLTLNNGSQAVGRSSFYCLEYFPSQMLRTGNNFTFSYTFEDVPFHSSYAHSQSLDRLMNPLIDQYLYYLNKTNNQSGTFTQSRLLFSQAGPTSILFKSKNWLPGPCYRQQRLSKTANDNNNSNFPWTAATKYHLNGRDSLVNPGPAMASHKDDEEKFFPMHGTLIFGKQGTKLTDADLDNVMITDEEEIRTTNPVATEQYGTVSNNLQKLNILATTGTVNTQGALPGMVWQDRDVYLQGPIWAKIPHTDGHFHPSPLMGGFGLKHPPPQIMIKNTPVPANPPTNFSSAKFASFITQYSTGQVSVEIEWELQKENSKRWNPEIQYTSNYNKSVNVDFTVDTNGVYSEPRPIGTRYLTRNL

SEQ ID NO: 4239 - protein, 735 aa, Artificial Sequence
  source: /note="Description of Artificial Sequence: Synthetic polypeptide"
MAADGYLPDWLEDTLSEGIRQWWKLKPGPPPPKPAERHKDDSRGLVLPGYKYLGPFNGLDKGEPVNEADAAALEHDKAYDRQLDSGDNPYLKYNHADAEFQERLKEDTSFGGNLGRAVFQAKKRVLEPLGLVEEPVKTAPGKKRPVEHSPVEPDSSSGTGKAGQQPARKRLNFGQTGDADSVPDPQPLGQPPAAPSGLGTNTMATGSGAPMADNNEGADGVGNSSGNWHCDSTWMGDRVITTSTRTWALPTYNNHLYKQISSQSGASNDNHYFGYSTPWGYFDFNRFHCHFSPRDWQRLINNNWGFRPKRLNFKLFNIQVKEVTQNDGTTTIANNLTSTVQVFTDSEYQLPYVLGSAHQGCLPPFPADVFMVPQYGYLTLNNGSQAVGRSSFYCLEYFPSQMLRTGNNFTFSYTFEDVPFHSSYAHSQSLDRLMNPLIDQYLYYLNKTNNQSGTFTQSRLLFSQAGPTSILFKSKNWLPGPCYRQQRLSKTANDNNNSNFPWTAATKYHLNGRDSLVNPGPAMASHKDDEEKFFPQHGTLIFGKQGTKLTDADLDNVMITDEEEIRTTNPVATEQYGTVSNNLQKLNILATTGTVNTQGALPGMVWQDRDVYLQGPIWAKIPHTDGHFHPSPLMGGFGLKHPPPQIMIKNTPVPANPPTNFSSAKFASFITQYSTGQVSVEIEWELQKENSKRWNPEIQYTSNYNKSVNVDFTVDTNGVYSEPRPIGTRYLTRNL

SEQ ID NO: 4240 - protein, 735 aa, Artificial Sequence
  source: /note="Description of Artificial Sequence: Synthetic polypeptide"
MAADGYLPDWLEDTLSEGIRQWWKLKPGPPPPKPAERHKDDSRGLVLPGYKYLGPFNGLDKGEPVNEADAAALEHDKAYDRQLDSGDNPYLKYNHADAEFQERLKEDTSFGGNLGRAVFQAKKRVLEPLGLVEEPVKTAPGKKRPVEHSPVEPDSSSGTGKAGQQPARKRLNFGQTGDADSVPDPQPLGQPPAAPTSLGSTTMATGSGAPMADNNEGADGVGNSSGNWHCDSQWLGDRVITTSTRTWALPTYNNHLYKQISSQSGASNDNHYFGHSTPWGYFDFNRFHCHFSPRDWQRLINNNWGFRPKRLNFKLFNIQVKEVTQNDGTTTIANNLTSTVQVFTDSEYQLPYVLGSAHQGCLPPFPADVFMVPQYGYLTLNNGSQAVGRSSFYCLEYFPSQMLRTGNNFTFSYTFEDVPFHSSYAHSQSLDRLMNPLIDQYLYYLNKTNNQSGTFTQSRLLFSQAGPTSILFKSKNWLPGPCYRQQRLSKTANDNNNSNFPWTAATKYHLNGRDSLVNPGPAMASHKDDEEKFFPMHGTLIFGKQGTKLTDADLDNVMITDEEEIRTTNPVATEQYGTVSNNLQKLNILATTGTVNTQGALPGMVWQDRDVYLQGPIWAKIPHTDGHFHPSPLMGGFGLKHPPPQIMIKNTPVPANPPTNFSSAKFASFITQYSTGQVSVEIEWELQKENSKRWNPEIQYTSNYNKSVNVDFTVDTNGVYSEPRPIGTRYLTRNL

SEQ ID NO: 4241 - protein, 735 aa, Artificial Sequence
  source: /note="Description of Artificial Sequence: Synthetic polypeptide"
MAADGYLPDWLEDTLSEGIRQWWKLKPGPPPPKPAERHKDDSRGLVLPGYKYLGPFNGLDKGEPVNEADAAALEHDKAYDRQLDSGDNPYLKYNHADAEFQERLKEDTSFGGNLGRAVFQAKKRVLEPLGLVEEPVKTAPGKKRPVEHSPVEPDSSSGTGKAGQQPARKRLNFGQTGDADSVPDPQPLGQPPAAPTSLGSTTMATGSGAPMADNNEGADGVGNSSGNWHCDSQWLGDRVITTSTRTWALPTYNNHLYKQISSQSGASNDNHYFGYSTPWGYFDFNRFHCHFSPRDWQRLINNNWGFRPKRLNFKLFNIQVKEVTQNDGTTTIANNLTSTVQVFTDSEYQLPYVLGSAHQGCLPPFPADVFMVPQYGYLTLNNGSQAVGRSSFYCLEYFPSQMLRTGNNFTFSYTFEDVPFHSSYAHSQSLDRLMNPLIDQYLYYLNKTNNQSGTFTQSRLLFSQAGPTSILFKSKNWLPGPCYRQQRLSKTANDNNNSNFPWTAATKYHLNGRDSLVNPGPAMASHKDDEEKFFPQHGTLIFGKQGTKLTDADLDNVMITDEEEIRTTNPVATEQYGTVSNNLQKLNILATTGTVNTQGALPGMVWQDRDVYLQGPIWAKIPHTDGHFHPSPLMGGFGLKHPPPQIMIKNTPVPANPPTNFSSAKFASFITQYSTGQVSVEIEWELQKENSKRWNPEIQYTSNYNKSVNVDFTVDTNGVYSEPRPIGTRYLTRNL

SEQ ID NO: 4242 - protein, 735 aa, Artificial Sequence
  source: /note="Description of Artificial Sequence: Synthetic polypeptide"
MAADGYLPDWLEDTLSEGIRQWWKLKPGPPPPKPAERHKDASRGLVLPGYKYLGPFNGLDKGEPVNEADAAALEHDKAYDRQLDSGDNPYLKYNHADAEFQERLKEDTPFGGNLGRAVFQAKKRVLEPLGLVEEPVKTAPGKKRPVEHSPVEPDSSSGTGKAGQRPARKRLNFGQTGDADSVPDPQPLGQPPAAPTSLGSTTMATGSGAPMADNNEGADGVGNSSGNWHCDSQWLGDRVITTSTRTWALPTYNNHLYKQIPSQSGASNDNHYFGYSTPWGYFDFNRFHCHFSPRDWQRLINNNWGFRPKRLNFKLFNIQVKEVTQNDGTTTIANNLTSTVQVFTDSEYQLPYVLGSAHQGCLPPFPADVFMVPQYGYLTLNNGSQAVGRSSFYCLEYFPSQMLRTGNNFTFSYTFEDVPFHSSYAHSQSLDRLMNPLIDQYLYYLNKTNNQSGTFTQSRLLFSQAGPTSILFKSKNWLPGPCYRQQRLSKTANDNNNSNFPWTAATKYHLNGRDSLVNPGPAMASHKDDEEKFFPQHGTLIFGKQGTKLTDADLDNVMITDEEEIRTTNPVATEQYGTVSNNLQKLNILATTGTVNTQGALPGMVWQDRDVYLQGPIWAKIPHTDGHFHPSPLMGGFGLKHPPPQIMIKNTPVPANPPTNFSSAKFASFITQYSTGQVSVEIEWELQKENSKRWNPEIQYTSNYNKSVNVDFTVDTNGVYSEPRPIGTRYLTRNL

SEQ ID NO: 4243 - protein, 735 aa, Artificial Sequence
  source: /note="Description of Artificial Sequence: Synthetic polypeptide"
MAADGYLPDWLEDTLSEGIRQWWKLKPGPPPPKPAERHKDDSRGLVLPGYKYLGPFNGLDKGEPVNEADAAALEHDKAYDRQLDSGDNPYLKYNHADAEFQERLKEDTSFGGNLGRAVFQAKKRVLEPLGLVEEPVKTAPGKKRPVEHSPVEPDSSSGTGKAGQQPARKRLNFGQTGDADSVPDPQPLGQPPAAPSGLGTNTMATGSGAPMADNNEGADGVGNSSGNWHCDSTWMGDRVITTSTRTWALPTYNNHLYKQISSQSGASNDNHYFGYSTPWGYFDFNRFHCHFSPRDWQRLINNNWGFRPKRLNFKLFNIQVKEVTQNDGTTTIANNLTSTVQVFTDSEYQLPYVLGSAHQGCLPPFPADVFMVPQYGYLTLNNGSQAVGRSSFYCLEYFPSQMLRTGNNFTFSYTFEDAPFHSSYAHSQSLDRLMNPLIDQYLYYLNKTNNQSGTFTQSRLLFSQAGPTSILFKSKNWLPGPCYRQQRLSKTANDNNNSNFPWTAATKYHLNGRDSLVNPGPAMASHKDDEEKFFPQHGTLIFGKQGTKLTDADLDNVMITDEEEIRTTNPVATEQYGTVSNNLQKLNILATTGTVNTQGALPGMVWQDRDVYLQGPIWAKIPHTDGHFHPSPLMGGFGLKHPPPQIMIKNTPVPANPPTNFSSAKFASFITQYSTGQVSVEIEWELQKENSKRWNPEIQYTSNYNKSVNVDFTVDTNGVYSEPRPIGTRYLTRNL

SEQ ID NO: 4244 - protein, 735 aa, Artificial Sequence
  source: /note="Description of Artificial Sequence: Synthetic polypeptide"
MAADGYLPDWLEDILSEGIRQWWKLKPGPPPPKPAERHKDASRGLVLPGYKYLGPFNGLDKGEPVNEADAAALEHDKAYDRQLDSGDNPYLKYNHADAEFQERLKEDTSFGGNLGRAVFQAKKRVLEPLGLVEEPVKTAPGKKRPVEHSPVEPDSSSGTGKAGQQPARKRLNFGQTGDADSVPDPQPLGQPPAAPTSLGSTTMATGSGAPMADNNEGADGVGNSSGNWHCDSQWLGDRVITTSTRTWALPTYNNHLYKQISSQSGASNDNHYFGYSTPWGYFDFNRFHCHFSPRDWQRLINNNWGFRPKRLNFKLFNIQVKEVTQNDGTTTIANNLTSTVQVFTDSEYQLPYVLGSAHQGCLPPFPADVFMVPQYGYLTLNNGSQAVGRSSFYCLEYFPSQMLRTGNNFTFSYTFEDVPFHSSYAHSQSLDRLMNPLIDQYLYYLNKTNNQSGTFTQSRLLFSQAGPTSILFKSKNWLPGPCYRQQRLSKTANDNNNSNFPWTAATKYHLNGRDSLVNPGPAMASHKDDEEKFFPQHGTLIFGKQGTKLTDADLDNVMITDEEEIRTTNPVATEQYGTVSNNLQKLNILATTGTVNTQGALPGMVWQDRDVYLQGPIWAKIPHTDGHFHPSPLMGGFGLKHPPPQIMIKNTPVPANPPTNFSSAKFASFITQYSTGQVSVEIEWELQKENSKRWNPEIQYTSNYNKSVNVDFTVDTNGVYSEPRPIGTRYLTRNL

SEQ ID NO: 4245 - protein, 735 aa, Artificial Sequence
  source: /note="Description of Artificial Sequence: Synthetic polypeptide"
MAADGYLPDWLEDILSEGIRQWWKLKPGPPPPKPAERHKDASRGLVLPGYKYLGPFNGLDKGEPVNEADAAALEHDKAYDRQLDSGDNPYLKYNHADAEFQERLKEDTSFGGNLGRAVFQAKKRVLEPLGLVEEPVKTAPGKKRPVEHSPVEPDSSSGTGKAGQQPARKRLNFGQTGDADSVPDPQPLGQPPAAPTSLGSTTMATGSGAPMADNNEGADGVGNSSGNWHCDSQWLGDRVIATSTRTWALPTYNNHLYKQISSQSGASNDNHYFGYSTPWGYFDFNRFHCHFSPRDWQRLINNNWGFRPKRLNFKLFNIQVKEVTQNDGTTTIANNLTSTVQVFTDSEYQLPYVLGSAHQGCLPPFPADVFMVPQYGYLTLNNGSQAVGRSSFYCLEYFPSQMLRTGNNFTFSYTFEDVPFHSSYAHSQSLDRLMNPLIDQYLYYLNKTNNQSGTFTQSRLLLSQAGPTSILFKSKNWLPGPCYRQQRLSKTANDNNNSNFPWTAATKYHLNGRDSLVNPGPAMASHKDDEEKFFPQHGTLIFGKQGTKLTDADLDNVMITDEEEIRTTNPVATEQYGTVSNNLQKLNILATTGTVNTQGALPGMVWQDRDVYLQGPIWAKIPHTDGHFHPSPLMGGFGLKHPPPQIMIKNTPVPANPPTNFSSAKFASFITQYSTGQVSVEIEWELQKENSKRWNPEIQYTSNYNKSVNVDFTVDTNGVYSEPRPIGTRYLTRNL

SEQ ID NO: 4246 - protein, 735 aa, Artificial Sequence
  source: /note="Description of Artificial Sequence: Synthetic polypeptide"
MAADGYLPDWLEDTLSEGIRQWWKLKPGPPPPKPAERHKDASRGLVLPGYKYLGPFNGLDKGEPVNEADAAALEHDKAYDRQLDSGDNPYLKYNHADAEFQERLKEDTPFGGNLGRAVFQAKKRVLEPLGLVEEPVKTAPGKKRPVEHSPVEPDSSSGTGKAGQQPARKRLNFGQTGDADSVPDPQPLGQPPAAPTSLGSTTMATGSGAPMADNNEGADGVGNSSGNWHCDSQWLGDRVITTSTRTWALPTYNNHLYKQIPSQSGASNDNHYFGYSTPWGYFDFNRFHCHFSPRDWQRLINNNWGFRPKRLNFKLFNIQVKEVTQNDGTTTIANNLTSTVQVFTDSEYQLPYVLGSAHQGCLPPFPADVFMVPQYGYLTLNNGSQAVGRSSFYCLEYFPSQMLRTGNNFTFSYTFEDVPFHSSYAHSQSLDRLMNPLIDQYLYYLNKTNNQSGTFTQSRLLFSQAGPTSILFKSKNWLPGPCYRQQRLSKTANDNNNSNFPWTAATKYHLNGRDSLVNPGPAMASHKDDEEKFFPQHGTLIFGKQGTKLTDADLDNVMITDEEEIRTTNPVATEQYGTVSNNLQKLNILATTGTVNTQGALPGMVWQDRDVYLQGPIWAKIPHTDGHFHPSPLMGGFGLKHPPPQIMIKNTPVPANPPTNFSSAKFASFITQYSTGQVSVEIEWELQKENSKRWNPEIQYTSNYNKSVNVDFTVDTNGVYSEPRPIGTRYLTRNL

SEQ ID NO: 4247 - protein, 735 aa, Artificial Sequence
  source: /note="Description of Artificial Sequence: Synthetic polypeptide"
  MOD_RES (172)..(172): Any naturally occurring amino acid
  MOD_RES (220)..(220): Any naturally occurring amino acid
  MOD_RES (367)..(367): Any naturally occurring amino acid
  MOD_RES (499)..(499): Any naturally occurring amino acid
  MOD_RES (558)..(558): Any naturally occurring amino acid
  MOD_RES (590)..(590): Any naturally occurring amino acid
  MOD_RES (597)..(597): Any naturally occurring amino acid
MAADGYLPDWLEDTLSEGIRQWWKLKPGPPPPKPAERHKDDSRGLVLPGYKYLGPFNGLDKGEPVNEADAAALEHDKAYDRQLDSGDNPYLKYNHADAEFQERLKEDTSFGGNLGRAVFQAKKRVLEPLGLVEEPVKTAPGKKRPVEHSPVEPDSSSGTGKAGQQPARKRLXFGQTGDADSVPDPQPLGQPPAAPSGLGTNTMATGSGAPMADNNEGADXVGNSSGNWHCDSTWMGDRVITTSTRTWALPTYNNHLYKQISSQSGASNDNHYFGYSTPWGYFDFNRFHCHFSPRDWQRLINNNWGFRPKRLNFKLFNIQVKEVTQNDGTTTIANNLTSTVQVFTDSEYQLPYVLGSAHQGCLPPFPXDVFMVPQYGYLTLNNGSQAVGRSSFYCLEYFPSQMLRTGNNFTFSYTFEDVPFHSSYAHSQSLDRLMNPLIDQYLYYLNKTNNQSGTFTQSRLLFSQAGPTSILFKSKNWLPGPCYRQQRLSKTANDNNNSXFPWTAATKYHLNGRDSLVNPGPAMASHKDDEEKFFPMHGTLIFGKQGTKLTDADLDNVXITDEEEIRTTNPVATEQYGTVSNNLQKLNILXTTGTVNXQGALPGMVWQDRDVYLQGPIWAKIPHTDGHFHPSPLMGGFGLKHPPPQIMIKNTPVPANPPTNFSYAKFASFITQYSTGQVSVEMEWELQKENSKRWNPEIPYTSKYNKSVNVDFTVDTNGVYSEPRPIGTRYLTRNL

SEQ ID NO: 4248 - protein, 735 aa, Artificial Sequence
  source: /note="Description of Artificial Sequence: Synthetic polypeptide"
MAADGYLPDWLEDTLSEGIRQWWKLKPGPPPPKPAERHQDDSRGLVLPGYKYLGPFNGLDKGEPVNEADAAALEHDKAYDRQLDSGDNPYLKYNHADAEFQERLKEDTSFGGNLGRAVFQAKKRVLEPLGLVEEPVKTAPGKKRPVEHSPAEPDSSSGTGKAGQQPARKRLNFGQTGDADSVPDPQPLGQPPAAPTSLGSTTMATGSGAPMADNNEGADGVGNSSGNWHCDSQWLGDRVITTSTRTWALPTYNNHLYKQISSQSGASNDNHYFGYSTPWGYFDFNRFHCHFSPRDWQRLINNNWGFRPKRLNFKLFNIQVKEVTQNDGTTTIANNLTSTVQVFTDSEYQLPYVLGSAHQGCLPPFPADVFMVPQYGYLTLNNGSQAVGRSSFYCLEYFPSQMLRTGNNFTFSYTFEDVPFHSSYAHSQSLDRLMNPLIDQYLYYLNRTQSNSGTLQQSRLLFSQAGPTSMSLQAKNWLPGPCYRQQRLSKQANDNNNSNFPWTAATKYHLNGRDSLVNPGPAMASHKDDEEKFFPMHGTLIFGKQGTNANDADLEHVMITDEEEIRTTNPVATEQYGNVSNNLQNSNTGPTTENVNHQGALPGMVWQDRDVYLQGPIWAKIPHTDGHFHPSPLMGGFGLKHPPPQIMIKNTPVPANPPTNFSAAKFASFITQYSTGQASVEIEWELQKENSKRWNPEIQYTSNYNKSVNVDFTVDTNGVYSEPRPIGTRYLTRNL

SEQ ID NO: 4249 - protein, 735 aa, Artificial Sequence
  source: /note="Description of Artificial Sequence: Synthetic polypeptide"
MAADGYLPDWLEDTLSEGIRQWWKLKPGPPPPKPAERHKDDSRGLVLPGYKYLGPFNGLDKGEPVNEADAAALEHDKAYDRQLDSGDNPYLKYNHADAEFQERLKEDTSFGGNLGRAVFQAKKRVLEPLGLVEEPVKTAPGKKRPVEHSPVEPDSSSGTGKAGQQPARKRLNFGQTGDADSVPDPQPLGQPPAAPTSLGSTTMATGSGAPMADNNEGADGVGNSSGNWHCDSQWLGDRVITTSTRTWALPTYNNHLYKQISSQSGASNDNHYFGHSTPWGYFDFNRFHCHFSPRDWQRLINNNWGFRPKRLNFKLFNIQVKEVTQNDGTTTIANNLTSTVQVFTDSEYQLPYVLGSAHQGCLPPFPADVFMVPQYGYLTLNNGSQAVGRSSFYCLEYFPSQMLRTGNNFTFSYTFEDVPFHSSYAHSQSLDRLMNPLIDQYLYYLNKTQSNSGTLQQSRLLFSQAGPTSMPLQAKNWLPGPCYRQQRLSKQANDNNNSNFPWTAATKYHLNGRDSLVNPGPAMASHKDDEEKFFPMHGTLIFGKQGTNANDADLDNVMITDEEEIRTTNPVATEQYGTVSNNLQNSNTGPTTGTVNHQGALPGMVWQDRDVYLQGPIWAKIPHTDGHFHPSPLMGGFGLKHPPPQIMIKNTPVPANPPTNFSSAKFASFITQYSTGQVSVEIEWELQKENSKRWNPEIQYTSNYNKSVNVDFTVDTNGVYSEPRPIGTRYLTRNL

SEQ ID NO: 4250 - protein, 735 aa, Artificial Sequence
  source: /note="Description of Artificial Sequence: Synthetic polypeptide"
MAADGYLPDWLEDTLSEGIRQWWKLKPGPPPPKPAERHKDDSRGLVLPGYKYLGPFNGLDKGEPVNEADAAALEHDKAYDRQLDSGDNPYLKYNHADAEFQERLKEDTSFGGNLGRAVFQAKKRVLEPLGLVEEPVKTAPGKKRPVEHSPVEPDSSSGTGKAGQQPARKRLNFGQTGDADSVPDPQPLGQPPAAPTSLGSTTMATGSGAPMADNNEGADGVGNSSGNWHCDSQWLGDRVITTSTRTWALPTYNNHLYKQISSQSGASNDNHYFGHSTPWGYFDFNRFHCHFSPRDWQRLINNNWGFRPKRLNFKLFNIQVKEVTQNDGTTTIANNLTSTVQVFTDSEYQLPYVLGSAHQGCLPPFPADVFMVPQYGYLTLNNGSQAVGRSSFYCLEYFPSQMLRTGNNFTFSYTFEDVPFHSSYAHSQSLDRLMNPLIDQYLYYLNKTQSNSGTLQQSRLLFSQAGPTSMSLQAKNWLPGPCYRQQRLSKQANDNNNSNFPWTAATKYHLNGRDSLVNPGPAMASHKDDEEKFFPMHGTLIFGKQGTNANDADLDNVMITDEEEIRTTNPVATEQYGTVSNNLQNSNTGPTTGTANHQGALPGMVWQDRDVYLQGPIWAKIPHTDGHFHPSPLMGGFGLKHPPPQIMIKNTPVPANPPTNFSSAKFASFITQYSTGQVSVEIEWELQKENSKRWNPEIQYTSNYNKSVNVDFTVDTNGVYSEPRPIGTRYLTRNL

SEQ ID NO: 4251 - protein, 735 aa, Artificial Sequence
  source: /note="Description of Artificial Sequence: Synthetic polypeptide"
MAADGYLPDWLEDTLSEGIRQWWKLKPGPPPPKPAERHKDDSRGLVLPGYKYLGPFNGLDKGEPVNEADAAALEHDKAYDRQLDSGDNPYLKYNHADAEFQERLKEDTSFGGNLGRAVFQAKKRVLEPLGLVEEPVKTAPGKKRPVEHSPVEPDSSSGTGKAGQQPARKRLNFGQTGDAGSVPDPQPLGQPPAAPTSLGSTTMATGSGAPMADNNEGADGVGNSSGNWHCDSQWLGDRVITTSTRTWALPTYNNHLYKQISSQSGASNDNHYFGHSTPWGYFDFNRFHCHFSPRDWQRLINNNWGFRPKRLNFKLFNIQVKEVTQNDGTTTIANNLTSTVQVFTDSEYQLPYVLGSAHQGCLPPFPADVFMVPQYGYLTLNNGSQAVGRSSFYCLEYFPSQMLRTGNNFTFSYTFEDVPFHSSYAHSQSLDRLMNPLIDQYLYYLNKTQSNSGTLQQSRLLFSQAGPTSMSLQAKNWLPGPCYRQQRLSKQANDNNNSNFPWTAATKYHLNGRDSLVNPGPAMASHKDDEEKFFPMHGTLIFGKQGTNANDADLDNVMITDEEEIRTTNPVATEQYGTVSNNLQNSNTGPTTGTVNHQGALPGMVWQDRDVYLQGPIWAKIPHTDGHFHPSPLMGGFGLKHPPPQIMIKNTPVPANPPTNFSSAKFASFITQYSTGQVSVEIEWELQKENSKRWNPEIQYTSNYNKSVNVDFTVDTNGVYSEPRPIGTRYLTRNL

SEQ ID NO: 4252 - protein, 735 aa, Artificial Sequence
  source: /note="Description of Artificial Sequence: Synthetic polypeptide"
MAADGYLPDWLEDTLSEGIRQWWKLKPGPPPPKPAERHKDDSRGLVLPGYKYLGPFNGLDKGEPVNEADAAALEHDKAYDRQLDSGDNPYLKYNHADAEFQERLKEDTSFGGNLGRAVFQAKKRVLEPLGLVEEPVKTAPGKKRPVEHSPVEPDSSSGTGKAGQQPARKRLNFGQTGDADSVPDPQPLGQPPAAPTSLGSTTMATGSGAPMADNNEGADGVGNSSGNWHCDSQWLDDRVITTSTRTWALPTYNNHLYKQISSQSGASNDNHYFGHSTPWGYFDFNRFHCHFSPRDWQRLINNNWGFRPKRLNFKLFNIQVKEVTQNDGTTTIANNLTSTVQVFTDSEYQLPYVLGSAHQGCLPPFPADVFMVPQYGYLTLNNGSQAVGRSSFYCLEYFPSQMLRTGNNFTFSYTFEDVPFHSSYAHSQSLDRLMNPLIDQYLYYLNKTQSNSGTLQQSRLLFSQAGPTSMSLQAKNWLPGPCYRQQRLSKQANDNNNSNFPWTAATKYHLNGRDSLVNPGPAMASHKDDEEKFFPMHGTLIFGKQGTNANDADLDNVMITDEEEIRTTNPVATEQYGTVSNNLQNSNTGPTTGTVNHQGALPGMVWQDRDVYLQGPIWAKIPHTDGHFHPSPLMGGFGLKHPPPQIMIKNTPVPANPPTNFSSAKFASFITQYSTGQVSVEIEWELQKENSKRWNPEIQYTSNYNKSVNVDFTVDTNGVYSEPRPIGTRYLTRNL

SEQ ID NO: 4253 - protein, 735 aa, Artificial Sequence
  source: /note="Description of Artificial Sequence: Synthetic polypeptide"
MAADGYLPDWLEDTLSEGIRQWWKLKPGPPPPKPAERHKDDSRGLVLPGYKYLGPFNGLDKGEPVNEADAAALEHDKAYDRQLDSGDNPYLKYNHADAEFQERLKEDTSFGGNLGRAVFQAKKRVLEPLGLVEEPVKTAPGKKRPVEHSPVEPGSSSGTGKAGQQPARKRLNFGQTGDADSVPDPQPLGQPPAAPTSLGSTTMATGSGAPMADNNEGADGVGNSSGNWHCDSQWLGDRVITTSTRTWALPTYNNHLYKQISSQSGASNDNHYFGHSTPWGYFDFNRFHCHFSPRDWQRLINNNWGFRPKRLNFKLFNIQVKEVTQNDGTTTIANNLTSTVQVFTDSEYQLPYVLGSAHQGCLPPFPADVFMVPQYGYLTLNNGSQAVGRSSFYCLEYFPSQMLRTGNNFTFSYTFEDVPFHSSYAHSQSLDRLMNPLIDQYLYYLNKTQSNSGTLQQSRLLFSQAGPTSMSLQAKNWLPGPCYRQQRLSKQANDNNNSNFPWTAATKYHLNGRDSLVNPGPAMASHKDDEEKFFPMHGTLIFGKQGTNANDADLDNVMITDEEEIRTTNPVATEQYGTVSNNLQNSNTGPTTGTVNHQGALPGMVWQDRDVYLQGPIWAKIPHTDGHFHPSPLMGGFGLKHPPPQIMIKNTPVPANPPTNFSSAKFASFITQYSTGQVSVEIEWELQKENSKRWNPEIQYTSNYNKSVNVDFTVDTNGVYSEPRPIGTRYLTRNL

SEQ ID NO: 4254 - protein, 735 aa, Artificial Sequence
  source: /note="Description of Artificial Sequence: Synthetic polypeptide"
MAADGYLPDWLEDTLSEGIRQWWKLKPGPPPPKPAERHKDDSRGLVLPGYKYLGPFNGLDKGEPVNEADAAALEHDKAYDRQLDSGDNPYLKYNHADAEFQERLKEDTSFGGNLGRAVFQAKKRVLEPLGLVEEPVKTAPGKKRPVEHSPVEPDSSSGTGKAGQQPARKRLNFGQTGDADSVPDPQPLGQPPAAPTSLGSTTMATGSGAPMADNNEGADGVGNSSGNWHCDSQWLGDRVITTSTRTWALPTYNNHLYKQISSQSGASNDNHYFGHSTPWGYFDFNRFHCHFSPRDWQRLINNNWGFRPKRLNFKLFNIQVKEVTQNDGTTTIANNLTSTVQVFTDSEYQLPYVLGSAHQGCLPPFPADVFMVPQYGYLTLNNGSQAVGRSSFYCLEYFPSQMLRTGNNFTFSYTFEDVPFHSSYAHSQSLDRLMNPLIDQYLYYLNKTQSNSGTLQQSRLLFSQAGPTSMSLQAKNWLPGPCYRQQRLSKQANDNNNSNFPWTAATKYHLNGRDSLVNPGPAMASHKDDEEKFFPMHGTLIFGKQGTNANDADLDNVMITDEEEIRTTNPVATEQYGTVSNNLQNSNTGPTTGTVNHQGALPGMVWQDRDVYLQGPIWAKIPHTDGHFHPSPLMGGFGLKHPPPQIMIKNTPVPANPPTNFSSAKFASFITQYSTGQVSVEIGWELQKENSKRWNPEIQYTSNYNKSVNVDFTVDTNGVYSEPRPIGTRYLTRNL

SEQ ID NO: 4255 - protein, 735 aa, Artificial Sequence
  source: /note="Description of Artificial Sequence: Synthetic polypeptide"
MAADGYLPDWLEDTLSEGIRQWWKLKPGPPPPKPAERHKDDSRGLVLPGYKYLGPFNGLDKGEPVNEADAAALEHDKAYDRQLDSGDNPYLKYNHADAEFQERLKEDTSFGGNLGRAVFQAKKRVLEPLGLVEEPVKTAPGKKRPVEHSPVEPDSSSGTGKAGQQPARKRLNFGQTGDADSVPDPQPLGQPPAAPTSLGSTTMATGSGAPMADNNEGADGVGNSSGNWHCDSQWLGDRVITTSTRTWALPTYNNHLYKQISSQSGASNDNHYFGHSTPWGYFDFNRFHCHFSPRDWQRLINNNWGFRPKRLNFKLFNIQVKEVTQNDGTTTIANNLTSTVQVFTDSEYQLPYVLGSAHQGCLPPFPADVFMVPQYGYLTLNNGSQAVGRSSFYCLEYFPSQMLRTGNNFTFSYTFEDVPFHSSYAHSQSLDRLMNPLIDRYLYYLNKTQSNSGTLQQSRLLFSQAGPTSMSLQAKNWLPGPCYRQQRLSKQANDNNNSNFPWTAATKYHLNGRDSLVNPGPAMASHKDDEEKFFPMHGTLIFGKQGTNANDADLDNVMITDEEEIRTTNPVATEQYGTVSNNLQNSNTGPTTGTVNHQGALPGMVWQDRDVYLQGPIWAKIPHTDGHFHPSPLMGGFGLKHPPPQIMIKNTPVPANPPTNFSSAKFASFITQYSTGQVSVEIEWELQKENSKRWNPEIQYTSNYNKSVNVDFTVDTNGVYSEPRPIGTRYLTRNL

SEQ ID NO: 4256 - protein, 735 aa, Artificial Sequence
  source: /note="Description of Artificial Sequence: Synthetic polypeptide"
MAADGYLPDWLEDTLSEGIRQWWKLKPGPPPPKPAERHKDDSRGLVLPGYKYLGPFNGLDKGEPVNEADAAALEHDKAYDRQLDSGDNPYLKYNHADAEFQERLKEDTSFGGNLGRAVFQAKKRVLEPLGLVEEPVKTAPGKKRPVEHSPVEPDSSSGTGKAGQQPARKRLNFGQTGDADSVPDPQPLGQPPAAPTSLGSTTMATGSGAPMADNNEGADGVGNSSGNWHCDSQWLGDRVITTSTRTWALPTYNNHLYKQISSQSGASNDNHYFGHSTPWGYFDFNRFHCHFSPRDWQRLINNNWGFRPKRLNFKLFNIQVKEVTQNDGTTTIANNLTSTVQVFTDSEYQLPYVLGSAHQGCLPPFPADVFMVPQYGYLTLNNGSQAVGRSSFYCLEYFPSQMLRTGNNFTFSYTFEDVPFHSSYAHSQSLDRLMNPLIDQHLYYLNKTQSNSGTLQQSRLLFSQAGPTSMSLQAKNWLPGPCYRQQRLSKQANDNNNSNFPWTAATKYHLNGRDSLVNPGPAMASHKDDEEKFFPMHGTLIFGKQGTNANDADLDNVMITDEEEIRTTNPVATEQYGTVSNNLQNSNTGPTTGTVNHQGALPGMVWQDRDVYLQGPIWAKIPHTDGHFHPSPLMGGFGLKHPPPQIMIKNTPVPANPPTNFSSAKFASFITQYSTGQVSVEIEWELQKENSKRWNPEIQYTSNYNKSVNVDFTVDTNGVYSEPRPIGTRYLTRNL

SEQ ID NO: 4257 - protein, 735 aa, Artificial Sequence
  source: /note="Description of Artificial Sequence: Synthetic polypeptide"
MAADGYLPDWLEDTLSEGIRQWWKLKPGPPPPKPAERHKDDSRGPVLPGYKYLGPFNGLDKGEPVNEADAAALEHDKAYDRQLDSGDNPYLKYNHADAEFQERLKEDTSFGGNLGRAVFQAKKRVLEPLGLVEEPVKTAPGKKRPVEHSPVEPDSSSGTGKAGQQPARKRLNFGQTGDADSVPDPQPLGQPPAAPTSLGSTTMATGSGAPMADNNEGADGVGNSSGNWHCDSQWLGDRVITTSTRTWALPTYNNHLYKQISSQSGASNDNHYFGHSTPWGYFDFNRFHCHFSPRDWQRLINNNWGFRPKRLNFKLFNIQVKEVTQNDGTTTIANNLTSTVQVFTDSEYQLPYVLGSAHQGCLPPFPADVFMVPQYGYLTLNNGSQAVGRSSFYCLEYFPSQMLRTGNNFTFSYTFEDVPFHSSYAHSQSLDRLMNPLIDQYLYYLNKTQSNSGTLQQSRLLFSQAGPTSMSLQAKNWLPGPCYRQQRLSKQANDNNNSNFPWTAATKYHLNGRDSLVNPGPAMASHKDDEEKFFPMHGTLIFGKQGTNANDADLDNVMITDEEEIRTTNPVATEQYGTVSNNLQNSNTGPTTGTVNHQGALPGMVWQDRDVYLQGPIWAKIPHTDGHFHPSPLMGGFGLKHPPPQIMIKNTPVPANPPTNFSSAKFASFITQYSTGQVSVEIEWELQKENSKRWNPEIQYTSNYNKSVNVDFTVDTNGVYSEPRPIGTRYLTRNL

SEQ ID NO: 4258 - protein, 735 aa, Artificial Sequence
  source: /note="Description of Artificial Sequence: Synthetic polypeptide"
MAADGYLPDWLEDTLSEGIRQWWKLKPGPPPPKPAERHKDDSRGLVLPGYKYLGPFNGLDKGEPVNEAGAAALEHDKAYDRQLDSGDNPYLKYNHADAEFQERLKEDTSFGGNLGRAVFQAKKRVLEPLGLVEEPVKTAPGKKRPVEHSPVEPDSSSGTGKAGQQPARKRLNFGQTGDADSVPDPQPLGQPPAAPTSLGSTTMATGSGAPMADNNEGADGVGNSSGNWHCDSQWLGDRVITTSTRTWALPTYNNHLYKQISSQSGASNDNHYFGHSTPWGYFDFNRFHCHFSPRDWQRLINNNWGFRPKRLNFKLFNIQVKEVTQNDGTTTIANNLTSTVQVFTDSEYQLPYVLGSAHQGCLPPFPADVFMVPQYGYLTLNNGSQAVGRSSFYCLEYFPSQMLRTGNNFTFSYTFEDVPFHSSYAHSQSLDRLMNPLIDQYLYYLNKTQSNSGTLQQSRLLFSQAGPTSMSLQAKNWLPGPCYRQQRLSKQANDNNNSNFPWTAATKYHLNGRDSLVNPGPAMASHKDDEEKFFPMHGTLIFGKQGTNANDADLDNVMITDEEEIRTTNPVATEQYGTVSNNLQNSNTGPTTGTVNHQGALPGMVWQDRDVYLQGPIWAKIPHTDGHFHPSPLMGGFGLKHPPPQIMIKNTPVPANPPTNFSSAKFASFITQYSTGQVSVEIEWELQKENSKRWNPEIQYTSNYNKSVNVDFTVDTNGVYSEPRPIGTRYLTRNL

SEQ ID NO: 4259 - protein, 735 aa, Artificial Sequence
  source: /note="Description of Artificial Sequence: Synthetic polypeptide"
MAADGYLPDWLEDTLSEGIRQWWKLKPGPPPPKPAERHKDDSRGLVLPGYKYLGPFNGLDKGEPVNGADAAALEHDKAYDRQLDSGDNPYLKYNHADAEFQERLKEDTSFGGNLGRAVFQAKKRVLEPLGLVEEPVKTAPGKKRPVEHSPVEPDSSSGTGKAGQQPARKRLNFGQTGDADSVPDPQPLGQPPAAPTSLGSTTMATGSGAPMADNNEGADGVGNSSGNWHCDSQWLGDRVITTSTRTWALPTYNNHLYKQISSQSGASNDNHYFGHSTPWGYFDFNRFHCHFSPRDWQRLINNNWGFRPKRLNFKLFNIQVKEVTQNDGTTTIANNLTSTVQVFTDSEYQLPYVLGSAHQGCLPPFPADVFMVPQYGYLTLNNGSQAVGRSSFYCLEYFPSQMLRTGNNFTFSYTFEDVPFHSSYAHSQSLDRLMNPLIDQYLYYLNKTQSNSGTLQQSRLLFSQAGPTSMSLQAKNWLPGPCYRQQRLSKQANDNNNSNFPWTAATKYHLNGRDSLVNPGPAMASHKDDEEKFFPMHGTLIFGKQGTNANDADLDNVMITDEEEIRTTNPVATEQYGTVSNNLQNSNTGPTTGTVNHQGALPGMVWQDRDVYLQGPIWAKIPHTDGHFHPSPLMGGFGLKHPPPQIMIKNTPVPANPPTNFSSAKFASFITQYSTGQVSVEIEWELQKENSKRWNPEIQYTSNYNKSVNVDFTVDTNGVYSEPRPIGTRYLTRNL

SEQ ID NO: 4260 - protein, 735 aa, Artificial Sequence
  source: /note="Description of Artificial Sequence: Synthetic polypeptide"
MAADGYLPDWLEDTLSEGIRQWWKLKPGPPPPKPAERHKDDSRGLVLPGYKYLGPFNGLDKGEPVNEADAAALEHDKAYDRQLDSGDNPYLKYNHADAEFQERLKEDTSFGGNLGRAVFQAKKRVLEPLGLVEEPVKTAPGKKRPVEHSPVEPDSSSGTGKAGQQPARKRLNFGQTGDADSVPDPQPLGQPPAAPTSLGSTTMATGSGAPMADNNEGADGVGNSSGNWHCDSQWLGDRVITTSTRTWALPTYNNHLYKQISSQSGASNDNHYFGHSTPWGYFDFNRFHCHFSPRDWQRLINNNWGFRPKRLNFKLFNIQVKEVTQNDGTTTIANNLTSTVQVFTDSEYQLPYVLGSAHQGCLPPFPADVFMVPQYGYLTLNNGSQAVGRSSLYCLEYFPSQMLRTGNNFTFSYTFEDVPFHSSYAHSQSLDRLMNPLIDQYLYYLNKTQSNSGTLQQSRLLFSQAGPTSMSLQAKNWLPGPCYRQQRLSKQANDNNNSNFPWTAATKYHLNGRDSLVNPGPAMASHKDDEEKFFPMHGTLIFGKQGTNANDADLDNVMITDEEEIRTTNPVATEQYGTVSNNLQNSNTGPTTGTVNHQGALPGMVWQDRDVYLQGPIWAKIPHTDGHFHPSPLMGGFGLKHPPPQIMIKNTPVPANPPTNFSSAKFASFITQYSTGQVSVEIEWELQKENSKRWNPEIQYTSNYNKSVNVDFTVDTNGVYSEPRPIGTRYLTRNL

SEQ ID NO: 4261 - protein, 735 aa, Artificial Sequence
  source: /note="Description of Artificial Sequence: Synthetic polypeptide"
MAADGYLPDWLEDTLSEGIRQWWKLKPGPPPPKPAERHKDDSRGLVLPGYKYLGPFNGLDKGEPVNEADAAALEHDKAYDRQLDSGDNPYLKYNHADAEFQERLKEDTSFGGNLGRAVFQAKKRVLEPLGLVEEPVKTAPGKKRPVEHSPVEPDSSSGTGKAGQQPARKRLNFGQTGDADSVPDPQPLGQPPAAPTSLGSTTMATGSGAPMADNNEGADGVGNSSGNWHCDSQWLGDRVITTSTRTWALPTYNNHLYKQISSQSGASNDNHYFGHSTPWGYFDFNRFHCHFSPRDWQRLINNNWGFRPKRLNFKLFNIQVKEVTQNDGTTTIANNLTSTVQVFTDSEYQLPYVLGSAHQGCLPPFPADVFMVPQYGYLTLNNGSQAVGRSSFYCLEYFPSQMLRTGNNFTSSYTFEDVPFHSSYAHSQSLDRLMNPLIDQYLYYLNKTQSNSGTLQQSRLLFSQAGPTSMSLQAKNWLPGPCYRQQRLSKQANDNNNSNFPWTAATKYHLNGRDSLVNPGPAMASHKDDEEKFFPMHGTLIFGKQGTNANDADLDNVMITDEEEIRTTNPVATEQYGTVSNNLQNSNTGPTTGTVNHQGALPGMVWQDRDVYLQGPIWAKIPHTDGHFHPSPLMGGFGLKHPPPQIMIKNTPVPANPPTNFSSAKFASFITQYSTGQVSVEIEWELQKENSKRWNPEIQYTSNYNKSVNVDFTVDTNGVYSEPRPIGTRYLTRNL

SEQ ID NO: 4262 - protein, 735 aa, Artificial Sequence
  source: /note="Description of Artificial Sequence: Synthetic polypeptide"
MAADGYLPDWLEDTLSEGIRQWWKLKPGPPPPKPAERHKDDSRGLVLPGYKYLGPFNGLDKGEPVNEADAAALEHDKAYDRQLDSGDNPYLKYNHADAEFQERLKEDTSFGGNLGRAVFQAKKRVLEPLGLVEEPVKTAPGKKRPVEHSPVEPDSSSGTGKAGQQPARKRLNFGQTGDADSVPDPQPLGQPPAAPTSLGSTTMATGSGAPMADNNEGADGVGNSSGNWHCDSQWLGDGVITTSTRTWALPTYNNHLYKQISSQSGASNDNHYFGHSTPWGYFDFNRFHCHFSPRDWQRLINNNWGFRPKRLNFKLFNIQVKEVTQNDGTTTIANNLTSTVQVFTDSEYQLPYVLGSAHQGCLPPFPADVFMVPQYGYLTLNNGSQAVGRSSFYCLEYFPSQMLRTGNNFTFSYTFEDVPFHSSYAHSQSLDRLMNPLIDQYLYYLNKTQSNSGTLQQSRLLFSQAGPTSMSLQAKNWLPGPCYRQQRLSKQANDNNNSNFPWTAATKYHLNGRDSLVNPGPAMASHKDDEEKFFPMHGTLIFGKQGTNANDADLDNVMITDEEEIRTTNPVATEQYGTVSNNLQNSNTGPTTGTVNHQGALPGMVWQDRDVYLQGPIWAKIPHTDGHFHPSPLMGGFGLKHPPPQIMIKNTPVPANPPTNFSSAKFASFITQYSTGQVSVEIEWELQKENSKRWNPEIQYTSNYNKSVNVDFTVDTNGVYSEPRPIGTRYLTRNL

SEQ ID NO: 4263 - protein, 735 aa, Artificial Sequence
  source: /note="Description of Artificial Sequence: Synthetic polypeptide"
MAADGYLPDWLEDTLSEGIRQWWKLKPGPPPPKPAERHKDDSRGLVLPGYKYLGPFNGLDKGEPVNEADAAALEHDKAYDRQLDSGDNPYLKYNHADAEFQERLKEDTSFGGNLGRAVFQAKKRVLEPLGLVEEPVKTAPGKKRPVEHSPVEPDSSSGTGKAGQQPARKRLNFGQTGDADSVPDPQPLGQPPAAPTSLGSTTMATGSGAPMADNNEGADGVGNSSGNWHCDSQWLGDRVITTSTRTWALPTYNNHLYKQISSQSGASNDNHYFGHSTPWGYFDFNRFHCHFSPRDWQRLINNNWGFRPKRLNFKLFNIQVKEVTQNDGTTTIANNLTSTVQVFTDSEYQLPYVLGSAHQGCLPPFPADVFMVPQYGYLTLNNGSQAVGRSSFYCLEYFPSQMLRTGNNFTFSYTFEDVPFHSSYAHSQSLDRLMNPLIDQYLYYLNKTQSNSGTLQQSRLLFSQAGPTSMSLQAKNWLPGPCYRQQRLSKQANDNNNSNFPWTAATKYHLNGRDSLVNPGPAMASHKDDEEKFFPMHGTLIFGKQGTNANDADLDNVMITDEEEIRTTNPVATEQYRTVSNNLQNSNTGPTTGTVNHQGALPGMVWQDRDVYLQGPIWAKIPHTDGHFHPSPLMGGFGLKHPPPQIMIKNTPVPANPPTNFSSAKFASFITQYSTGQVSVEIEWELQKENSKRWNPEIQYTSNYNKSVNVDFTVDTNGVYSEPRPIGTRYLTRNL

SEQ ID NO: 4264 - protein, 735 aa, Artificial Sequence
  source: /note="Description of Artificial Sequence: Synthetic polypeptide"
MAADGYLPDWLEDTLSEGIRQWWKLKPGPPPPKPAERHKDDSRGLVLPGYKYLGPFNGLDKGEPVNEADAAALEHDKAYDRQLDSGDNPYLKYNHADAEFQERLKEDTSFGGNLGRAVFQAKKRVLEPLGLVEEPVKTAPGKKRPVEHSPVEPDSSSGTGKAGQQPARKRLNFGQTGDADSVPDPQPLGQPPAAPTSLGSTTMATGSGAPMADNNEGADGVGNSSGNWHCDSQWLGDRVITTSTRTWALPTYNNHLYKQISSQSGASNDNHYFGHSTPWGYFDFNRFHCHFSPRDWQRLINNNWGFRPKRLNFKLFNIQVKEVTQNDGTTTIANNLTSTVRVFTDSEYQLPYVLGSAHQGCLPPFPADVFMVPQYGYLTLNNGSQAVGRSSFYCLEYFPSQMLRTGNNFTFSYTFEDVPFHSSYAHSQSLDRLMNPLIDQYLYYLNKTQSNSGTLQQSRLLFSQAGPTSMSLQAKNWLPGPCYRQQRLSKQANDNNNSNFPWTAATKYHLNGRDSLVNPGPAMASHKDDEEKFFPMHGTLIFGKQGTNANDADLDNVMITDEEEIRTTNPVATEQYGTVSNNLQNSNTGPTTGTVNHQGALPGMVWQDRDVYLQGPIWAKIPHTDGHFHPSPLMGGFGLKHPPPQIMIKNTPVPANPPTNFSSAKFASFITQYSTGQVSVEIEWELQKENSKRWNPEIQYTSNYNKSVNVDFTVDTNGVYSEPRPIGTRYLTRNL

SEQ ID NO: 4265 - protein, 735 aa, Artificial Sequence
  source: /note="Description of Artificial Sequence: Synthetic polypeptide"
MAADGYLPDWLEDTLSEGIRQWWKLKPGPPPPKPAERHKDDSRGLVLPGYKYLGPFNGLDKGEPVNEADAAALEHDKAYDRQLDSGDNPYLKYNHADAEFQERLKEDTSFGGNLGRAVFQAKKRVLEPLGLVEEPVKTAPGKKRPVEHSPVEPDSSSGTGKAGQQPARKRLNFGQTGDADSVPDPQPLGQPPAAPTSLGSTTMATGSGAPMADNNEGADGVGNSSGNWHCDSQWLGDRVITTSTRTWALPTYNNHLYKQISSQSGASNDNHYFGHSTPWGYFDFNRFHCHFSPRDWQRLINNNWGFRPKRLNFKLFNIQVKEVTQNDGTTTIANNLTSTVQVFTDSEYQLPYVLGSAHQGCLPPFPADVFMVPQYGYLTLNNGSQAVGRSSFYCLEYFPSQMLRTGNNFTFSYTFEDVPFHSSYAHSQSLDRLMNPLIDQYLYYLNKTQSNSGTLRQSRLLFSQAGPTSMSLQAKNWLPGPCYRQQRLSKQANDNNNSNFPWTAATKYHLNGRDSLVNPGPAMASHKDDEEKFFPMHGTLIFGKQGTNANDADLDNVMITDEEEIRTTNPVATEQYGTVSNNLQNSNTGPTTGTVNHQGALPGMVWQDRDVYLQGPIWAKIPHTDGHFHPSPLMGGFGLKHPPPQIMIKNTPVPANPPTNFSSAKFASFITQYSTGQVSVEIEWELQKENSKRWNPEIQYTSNYNKSVNVDFTVDTNGVYSEPRPIGTRYLTRNL

SEQ ID NO: 4266 - protein, 735 aa, Artificial Sequence
  source: /note="Description of Artificial Sequence: Synthetic polypeptide"
MAADGYLPDWLEDTLSEGIRQWWKLKPGPPPPKPAERHKDDSRGLVLPGYKYLGPFNGLDKGEPVNEADAAALEHDKAYDRQLDSGDNPYLKYNHADAEFQERLKEDTSFGGNLGRAVFQAKKRVLEPLGLVEEPVKTAPGKKRPVEHSPVEPDSSSGTGKAGQQPARKRLNFGQTGDADSVPDPQPLGQPPAAPTSLGSTTMATGSGAPMADNNEGADGVGNSSGNWHCDSQWLGDRVITTSTRTWALPTYNNHLYKQISSQSGASNDNHYFGHSTPWGYFDFNRFHCHFSPRDWQRLINNNWGFRPKRLNFKLFNIQVKEVTQNDGTTTIANNLTSTVQVFTDSEYQLPYVLGSAHQGCLPPFPADVFMVPQYGYLTLNNGSQAVGRSSFYCLEYFPSQMLRTGNNFTFSYTFEDVPFHSSYAHSQSLDRLMNPLIDQYLYYLNKTQSNSGTLQQSRLLFSQAGPTSMSLQAKNWLPGPCYRQQRLSKQANDNNNSNFPWTAATKYHLNGRDSLVNPGPAMASHKDDEEKFFPMHGTLIFGKQGTNANDADLDNVMITDEEEIRTTNPVATEQYGTVSNNLQNSNTGPTTGTVNRQGALPGMVWQDRDVYLQGPIWAKIPHTDGHFHPSPLMGGFGLKHPPPQIMIKNTPVPANPPTNFSSAKFASFITQYSTGQVSVEIEWELQKENSKRWNPEIQYTSNYNKSVNVDFTVDTNGVYSEPRPIGTRYLTRNL

SEQ ID NO: 4267 - protein, 735 aa, Artificial Sequence
  source: /note="Description of Artificial Sequence: Synthetic polypeptide"
MAADGYLPDWLEDTLSEGIRQWWKLKPGPPPPKPAERHKDDSRGLVLPGYKYLGPFNGLDKGEPVNEADAAALEHDKAYDRQLDSGDNPYLKYNHADAEFQERLKEDTSFGGNLGRAVFQAKKRVLEPLGLVEEPVKTAPGKKRPVEHSPVEPDSSSGTGKAGQQPARKRLNFGQTGDADSVPDPQPLGQPPAAPTSLGSTTMATGSGAPMADNNEGADGVGNSSGNWHCDSQWLGDRVITTSTRTWALPTYNNHLYKQISSQSGASNDNHYFGHSTPWGYFDFNRFHCHFSPRDWQRLINNNWGFRPKRLNFKLFNIQVKEVTQNDGTTTIANNLTSTVQVFTDSEYQLPYVLGSAHQGCLPPFPADVFMVPQYGYLTLNNGSQAVGRSSFYCLEYFPSQMLRTGNNFTFSYTFEDVPFHSSYAHSQSLDRLMNPLIDQYLYYLNKTQSNSGTLQQSRLLFSQAGPTSMSLQAKNWLPGPCYRQQRLSKQANDNNNGNFPWTAATKYHLNGRDSLVNPGPAMASHKDDEEKFFPMHGTLIFGKQGTNANDADLDNVMITDEEEIRTTNPVATEQYGTVSNNLQNSNTGPTTGTVNHQGALPGMVWQDRDVYLQGPIWAKIPHTDGHFHPSPLMGGFGLKHPPPQIMIKNTPVPANPPTNFSSAKFASFITQYSTGQVSVEIEWELQKENSKRWNPEIQYTSNYNKSVNVDFTVDTNGVYSEPRPIGTRYLTRNL

SEQ ID NO: 4268 - protein, 735 aa, Artificial Sequence
  source: /note="Description of Artificial Sequence: Synthetic polypeptide"
MAADGYLPDWLEDTLSEGIRQWWKLKPGPPPPKPAERHKDDSRGLVLPGYKYLGPFNGLDKGEPVNEADAAALEHDKAYDRQLDSGDNPYLKYNHADAEFQERLKEDTSFGGNLGRAVFQAKKRVLEPLGLVEEPVKTAPGKKRPVEHSPVEPDSSSGTGKAGQQPARKRLNFGQTGDADSVPDPQPLGQPPAAPTSLGSTTMATGSGAPMADNNEGADGVGNSSGNWHCDSQWLGDRVITTSTRTWALPTYNNHLYKQISSQSGASNDNHYFGHSTPWGYFDFNRFHCHFSPRDWQRLINNNWGFRPKRLNFKLFNIQVKEVTQNDGTTTIANNLTSTVQVFTDSEYQLPYVLGSAHQGCLPPFPADVFMVPQYGYLTLNNGSQAVGRSSFYCLEYFPSQMLRTGNNFTFSYTFEDVPFHSSYAHSQSLDRLMNPLIDQYLYYLNKTQSNSGTLQQSRLLFSQAGPTSMSLQAKNWLPGPCYRQQRLSKQANDNNNSNFPWTAATKYHLNGRDSLVNPGPAMASHKDDEEKFFPMHGTLIFGKQGTNANDADLDNVMITDEEEIRTTNPVATEQYGTVSNNLQNSNTGPTTGTVNHQGALPGMVWQDRDVYLQGPIWAKIPHTDGHFHPSPLMGGFGLKHPPPQIMIKNTPVPANPPTNFSSAKFASFITQYSTGQVSVEIEWELQKENGKRWNPEIQYTSNYNKSVNVDFTVDTNGVYSEPRPIGTRYLTRNL

SEQ ID NO: 4269 - protein, 735 aa, Artificial Sequence
  source: /note="Description of Artificial Sequence: Synthetic polypeptide"
MAADGYLPDWLEDALSEGIRQWWKLKPGPPPPKPAERHKDDSRGLVLPGYKYLGPFNGLDKGEPVNEADAAALEHDKAYDRQLDSGDNPYLKYNHADAEFQERLKEDTSFGGNLGRAVFQAKKRVLEPLGLVEEPVKTAPGKKRPVEHSPVEPDSSSGTGKAGQQPARKRLNFGQTGDADSVPDPQPLGQPPAAPTSLGSTTMATGSGAPMADNNEGADGVGNSSGNWHCDSQWLGDRVITTSTRTWALPTYNNHLYKQISSQSGASNDNHYFGHSTPWGYFDFNRFHCHFSPRDWQRLINNNWGFRPKRLNFKLFNIQVKEVTQNDGTTTIANNLTSTVQVFTDSEYQLPYVLGSAHQGCLPPFPADVFMVPQYGYLTLNNGSQAVGRSSFYCLEYFPSQMLRTGNNFTFSYTFEDVPFHSSYAHSQSLDRLMNPLIDQYLYYLNKTQSNSGTLQQSRLLFSQAGPTSMSLQAKNWLPGPCYRQQRLSKQANDNNNSNFPWTAATKYHLNGRDSLVNPGPAMASHKDDEEKFFPMHGTLIFGKQGTNANDADLDNVMITDEEEIRTTNPVATEQYGTVSNNLQNSNTGPTTGTVNHQGALPGMVWQDRDVYLQGPIWAKIPHTDGHFHPSPLMGGFGLKHPPPQIMIKNTPVPANPPTNFSSAKFASFITQYSTGQVSVEIEWELQKENSKRWNPEIQYTSNYNKSVNVDFTVDTNGVYSEPRPIGTRYLTRNL

SEQ ID NO: 4270 - protein, 735 aa, Artificial Sequence
  source: /note="Description of Artificial Sequence: Synthetic polypeptide"
MAADGYLPDWLEDTLSEGIRQWWKLKPGPPPPKPAERHKDDSRGLVLPGYKYLGPFNGLDKGEPVNEADAAALEHDKAYDRQLDSGDNPYLKYNHADAEFQERLKEDTPFGGNLGRAVFQAKKRVLEPLGLVEEPVKTAPGKKRPVEHSPVEPDSSSGTGKAGQQPARKRLNFGQTGDADSVPDPQPLGQPPAAPTSLGSTTMATGSGAPMADNNEGADGVGNSSGNWHCDSQWLGDRVITTSTRTWALPTYNNHLYKQISSQSGASNDNHYFGHSTPWGYFDFNRFHCHFSPRDWQRLINNNWGFRPKRLNFKLFNIQVKEVTQNDGTTTIANNLTSTVQVFTDSEYQLPYVLGSAHQGCLPPFPADVFMVPQYGYLTLNNGSQAVGRSSFYCLEYFPSQMLRTGNNFTFSYTFEDVPFHSSYAHSQSLDRLMNPLIDQYLYYLNKTQSNSGTLQQSRLLFSQAGPTSMSLQAKNWLPGPCYRQQRLSKQANDNNNSNFPWTAATKYHLNGRDSLVNPGPAMASHKDDEEKFFPMHGTLIFGKQGTNANDADLDNVMITDEEEIRTTNPVATEQYGTVSNNLQNSNTGPTTGTVNHQGALPGMVWQDRDVYLQGPIWAKIPHTDGHFHPSPLMGGFGLKHPPPQIMIKNTPVPANPPTNFSSAKFASFITQYSTGQVSVEIEWELQKENSKRWNPEIQYTSNYNKSVNVDFTVDTNGVYSEPRPIGTRYLTRNL

SEQ ID NO: 4271 - DNA, 2205 bp, Artificial Sequence
  source: /note="Description of Artificial Sequence: Synthetic polynucleotide"
atggctgccgatggttatcttccagattggctcgaggacactctctctgaaggaataagacagtggtggaagctcaaacctggcccaccaccgccaaagcccgcagagcggcacaaggacgacagtaggggtcttgtgcttcctgggtacaagtacctcggacccttcaacggactcgacaaaggagagccggtcaacgaggcagacgccgcggccctcgagcacgacaaggcctacgaccggcagctcgacagcggagacaacccgtacctcaagtacaaccacgccgacgcggagtttcaggagcgtcttaaagaagatacgtcttttgggggcaacctcggacgagcagtattccaggcgaaaaagagggttcttgaacctctgggcctggttgaggagcctgttaagacggctccgggaaaaaagaggccggtagagcactctcctgtggagccagactcctcctcgggaaccggaaaggcgggccagcagcctgcaagaaaaagattgaattttggtcagactggagacgcagactcagtacctgacccccagcctctcggacagccaccagcagccccctctggtctgggaactaatacgatggctacaggcagtggcgcaccaatggcagacaataacgagggcgccgacggagtgggtaattcctcgggaaattggcattgcgattccacatggatgggcgacagagtcatcaccaccagcacccgaacctgggccctgcccacctacaacaaccacctctacaaacaaatttccagccaatcaggagcctcgaacgacaatcactactttggctacagcaccccttgggggtattttgacttcaacagattccactgccacttttcaccacgtgactggcaaagactcatcaacaacaactggggattccgacccaagagactcaacttcaagctctttaacattcaagtcaaagaggtcacgcagaatgacggtacgacgacgattgccaataaccttaccagcacggttcaggtgtttactgactcggagtaccagctcccgtacgtcctcggctcggcgcatcaaggatgcctcccgccgttcccagcagacgtcttcatggtgccacagtatggatacctcaccctgaacaacgggagtcaggcagtaggacgctcttcattttactgcctggagtactttccttctcagatgctgcgtaccggaaacaactttaccttcagctacacttttgaggacgttcctttccacagcagctacgctcacagccagagtctggaccgtctcatgaatcctctcatcgaccagtacctgtattacttgagcagaacacactccaatagtggaactcaccagcagtcaaggcttcagttttctcaggccggagcgagcatgtcgggaccagctaggaactggcttcctggaccctgttaccgccagcagcgagtatcaaagcagtctgcggataacaacaacagtgaatactcgtggactggagctaccaagtaccacctcaatggcagagactctctggtgaatccgggcccggccatggcaagccacaaggacgatgaagaaaagtttttcctcatgagcggggttctcatctttgggaagcaaggctcagatgaaaacaatgtggacattgaaaaggtcatgattacagacgaagaggaaatcaggacaaccaatcccgtggctacggagcagtatggttctgtatctaccaacctccaagaggcaaagacaagtccagctaccgcagatgtcaatcaccaaggcgttcttccaggcatggtctggcaggacagagatgtgtaccttcaggggcccatctgggcaaagattccacacacggacggacattttcacccctctcccctcatgggtggattcggacttaaacaccctcctccacagattctcatcaagaacaccccggtacctgcgaatccttcgaccaccttcagtgcggcaaagtttgcttccttcatcacacagtactccacgggacaggccagcgtggagatcgagtgggagctgcagaaggaaaacagcaaacgctggaatcccgaaattcagtacacttccaactacaacaagtctgttaatgtggactttactgtggacactaatggcgtgtattcagagcctcgccccattggcaccagatacctgactcgtaatctgtaa

SEQ ID NO: 4272 - DNA, 2205 bp, Artificial Sequence
  source: /note="Description of Artificial Sequence: Synthetic polynucleotide"
atggctgccgatggttatcttccagattggctcgaggacactctctctgaaggaataagacagtggtggaagctcaaacctggcccaccaccgccaaagcccgcagagcggcacaaggacgacagtaggggtcttgtgcttcctgggtacaagtacctcggacccttcaacggactcgacaaaggagagccggtcaacgaggcagacgccgcggccctcgagcacgacaaggcctacgaccggcagctcgacagcggagacaacccgtacctcaagtacaaccacgccgacgcggagtttcaggagcgtcttaaagaagatacgtcttttgggggcaacctcggacgagcagtattccaggcgaaaaagagggttcttgaacctctgggcctggttgaggagcctgttaagacggctccgggaaaaaagaggccggtagagcactctcctgtggagccagactcctcctcgggaaccggaaaagcgggccagcagcctgcaagaaaaagattgaattttggtcagactggagacgcagactccgtacctgacccccagcctctcggacagccaccagcagcccccacaagtttgggatctactacaatggctacaggcagtggcgcaccaatggcagacaataacgagggtgccgatggagtgggtaattcctcaggaaattggcattgcgattcccaatggctgggcgacagagtcatcaccaccagcacccgaacctgggccctgcccacctacaacaaccacctctacaagcaaatctccagccaatcaggagcatcgaacgacaaccactactttggccacagcaccccttgggggtattttgacttcaacagattccactgtcacttctccccacgtgactggcaaagactcatcaacaacaactggggattccgacccaagagactcaacttcaagctctttaacattcaagtcaaagaggtcacgcagaatgacggtacgacgacgattgccaataaccttaccagcacggttcaggtgtttactgactcggagtaccagctcccgtacgtcctcggctcggcgcatcaaggatgcctcccgccgttcccagcagacgtcttcatggtgccacagtatggatacctcaccctgaacaacgggagtcaggcagtaggacgctcttcattttactgcctggagtacttcccttctcagatgctgcgtaccggaaacaactttaccttcagctacacttttgaggacgttcctttccacagcagctacgctcacagccagagtctggaccgtctcatgaatcctctcatcgaccagtacctgtattacttgagcagaacacactccaatagtggaactcaccagcagtcaaggcttcagttttctcaggccggagcgagcatgtcgggaccagctaggaactggcttcctggaccctgttaccgccagcagcgagtatcaaagcagtctgcggataacaacaacagtgaatactcgtggactggagctaccaagtaccgcctcaatggcagagactctctggtgaatccgggctcggccatggcaagccacaaggacgatgaagaaaagtttttcctcatgagcggggttctcatctttgggaagcaaggctcagatgaaaacaatgtggacattgaaaaggtcatgattacagacgaagaggaaatcaggacaaccaatcccgtggctacggagcagtatggttctgtatctaccaacctccaagaggcaaagacaagtccagctaccgcagatgtcaatcaccaaggcgttcttccaggcatggtctggcaggacagagatgtgtaccttcaggggcccatctgggcaaagattccacacacggacggacattttcacccctctcccctcatgggtggattcggacttaaacaccctcctccacagattctcatcaagaacaccccggtacctgcgaatccttcgaccaccttcagtgcggcaaagtttgcttccttcatcacacagtactccacgggacaggtcagcgtggagatcgagtgggagctgcagaaggaaaacagcaaacgctggaatcccgaaattcagtacacttccaactacaacaagtctgttaatgtggactttactgtggacactaatggcgtgtattcagagcctcgccccattggcaccagatacctgactcgtaatctgtaa

SEQ ID NO: 4273 - DNA, 2205 bp, Artificial Sequence
  source: /note="Description of Artificial Sequence: Synthetic polynucleotide"
atggctgccgatggttatcttccagattggctcgaggacactctctctgaaggaataagacagtggtggaagctcaaacctggcccaccaccgccaaagcccgcagagcggcacaaggacgacagtaggggtcttgtgcttcctgggtacaagtacctcggacccttcaacggactcgacaaaggagagccggtcaacgaggcagacgccgcggccctcgagcacgacaaggcctacgaccggcagctcgacagcggagacaacccgtacctcaagtacaaccacgccgacgcggagtttcaggagcgtcttaaagaagatacgtcttttgggggcaacctcggacgagcagtattccaggcgaaaaagagggttcttgaacctctgggcctggttgaggagcctgttaagacggctccgggaaaaaagaggccggtagagcactctcctgtggagccagactcctcctcgggaaccggaaaggcgggccagcagcctgcaagaaaaagattgaattttggtcagactggagacgcagactcagtacctgacccccagcctctcggacagccaccagcagccccctctggtctgggaactaatacgatggctacaggcagtggcgcaccaatggcagacaataacgagggcgccgacggagtgggtaattcctcgggaaattggcattgcgattccacatggatgggcgacagagtcatcaccaccagcacccgaacctgggccctgcccacctacaacaaccacctctacaaacaaatttccagccaatcaggagcctcgaacgacaatcactactttggctacagcaccccttgggggtattttgacttcaacagattccactgccacttttcaccacgtgactggcaaagactcatcaacaacaactggggattccgacccaagagactcaacttcaagctctttaacattcaagtcaaagaggtcacgcagaatgacggtacgacgacgattgccaataaccttaccagcacggttcaggtgtttactgactcggagtaccagctcccgtacgtcctcggctcggcgcatcaaggatgcctcccgccgttcccagcagacgtcttcatggtgccacagtatggatacctcaccctgaacaacgggagtcaggcagtaggacgctcttcattttactgcctggagtacttcccttctcagatgctgcgtaccggaaacaactttaccttcagctacacttttgaggacgttcctttccacagcagctacgctcacagccagagtctggaccgtctcatgaatcctctcatcgaccagtacctgtattacttgagcagaacacactccaatagtggaactcaccagcagtcaaggcttcagttttctcaggccggagcgagcatgtcgggaccagctaggaactggcttcctggaccctgttaccgccagcagcgagtatcaaagcagtctgcggataacaacaacagtgaatactcgtggactggagctaccaagtaccgcctcaatggcagagactctctggtgaatccgggctcggccatggcaagccacaaggacgatgaagaaaagtttttcctcatgagcggggttctcatctttgggaagcaaggctcagatgaaaacaatgtggacattgaaaaggtcatgattacagacgaagaggaaatcaggacaaccaatcccgtggctacggagcagtatggttctgtatctaccaacctccaagaggcaaagacaagtccagctaccgcagatgtcaatcaccaaggcgttcttccaggcatggtctggcaggacagagatgtgtaccttcaggggcccatctgggcaaagattccacacacggacggacattttcacccctctcccctcatgggtggattcggacttaaacaccctcctccacagattctcatcaagaacaccccggtacctgcgaatccttcgaccaccttcagtgcggcaaagtttgcttccttcatcacacagtactccacgggacaggtcagcgtggagatcgagtgggagctgcagaaggaaaacagcaaacgctggaatcccgaaattcagtacacttccaactacaacaagtctgttaatgtggactttactgtggacactaatggcgtgtattcagagcctcgccccattggcaccagatacctgactcgtaatctgtaa

SEQ ID NO: 4274 - DNA, 2205 bp, Artificial Sequence
  source: /note="Description of Artificial Sequence: Synthetic polynucleotide"
atggctgccgatggttatcttccagattggctcgaggacactctctctgaaggaataagacagtggtggaagctcaaacctggcccaccaccgccaaagcccgcagagcggcacaaggacgacagtaggggtcttgtgcttcctgggtacaagtacctcggacccttcaacggactcgacaaaggagagccggtcaacgaggcagacgccgcggccctcgagcacgacaaggcctacgaccggcagctcgacagcggagacaacccgtacctcaagtacaaccacgccgacgcggagtttcaggagcgtcttaaagaagatacgtcttttgggggcaacctcggacgagcagtattccaggcgaaaaagagggttcttgaacctctgggcctggttgaggagcctgttaagacggctccgggaaaaaagaggccggtagagcactctcctgtggagccagactcctcctcgggaaccggaaaagcgggccagcagcctgcaagaaaaagattgaattttggtcagactggagacgcagactccgtacctgacccccagcctctcggacagccaccagcagcccccacaagtttgggatctactacaatggctacaggcagtggcgcaccaatggcagacaataacgagggtgccgatggagtgggtaattcctcaggaaattggcattgcgattcccaatggctgggcgacagagtcatcaccaccagcacccgaacctgggccctgcccacctacaacaaccacctctacaagcaaatctccagccaatcaggagcatcgaacgacaaccactactttggccacagcaccccttgggggtattttgacttcaacagattccactgtcacttctccccacgtgactggcaaagactcatcaacaacaactggggattccgacccaagagactcaacttcaagctctttaacattcaagtcaaagaggtcacgcagaatgacggtacgacgacgattgccaataaccttaccagcacggttcaggtgtttactgactcggagtaccagctcccgtacgtcctcggctcggcgcatcaaggatgcctcccgccgttcccagcagacgtcttcatggtgccacagtatggatacctcaccctgaacaacgggagtcaggcagtaggacgctcttcattttactgcctggagtactttccttctcagatgctgcgtaccggaaacaactttaccttcagctacacttttgaggacgttcctttccacagcagctacgctcacagccagagtctggaccgtctcatgaatcctctcatcgaccagtacctgtattacttgagcagaacacactccaatagtggaactcaccagcagtcaaggcttcagttttctcaggccggagcgagcatgtcgggaccagctaggaactggcttcctggaccctgttaccgccagcagcgagtatcaaagcagtctgcggataacaacaacagtgaatactcgtggactggagctaccaagtaccacctcaatggcagagactctctggtgaatccgggcccggccatggcaagccacaaggacgatgaagaaaagtttttcctcatgagcggggttctcatctttgggaagcaaggctcagatgaaaacaatgtggacattgaaaaggtcatgattacagacgaagaggaaatcaggacaaccaatcccgtggctacggagcagtatggttctgtatctaccaacctccaagaggcaaagacaagtccagctaccgcagatgtcaatcaccaaggcgttcttccaggcatggtctggcaggacagagatgtgtaccttcaggggcccatctgggcaaagattccacacacggacggacattttcacccctctcccctcatgggtggattcggacttaaacaccctcctccacagattctcatcaagaacaccccggtacctgcgaatccttcgaccaccttcagtgcggcaaagtttgcttccttcatcacacagtactccacgggacaggccagcgtggagatcgagtgggagctgcagaaggaaaacagcaaacgctggaatcccgaaattcagtacacttccaactacaacaagtctgttaatgtggactttactgtggacactaatggcgtgtattcagagcctcgccccattggcaccagatacctgactcgtaatctgtaa

SEQ ID NO: 4275 - DNA, 2205 bp, Artificial Sequence
  source: /note="Description of Artificial Sequence: Synthetic polynucleotide"
atggctgccgatggttatcttccagattggctcgaggacactctctctgaaggaataagacagtggtggaagctcaaacctggcccaccaccgccaaagcccgcagagcggcacaaggacgacagtaggggtcttgtgcttcctgggtacaagtacctcggacccttcaacggactcgacaaaggagagccggtcaacgaggcagacgccgcggccctcgagcacgacaaggcctacgaccggcagctcgacagcggagacaacccgtacctcaagtacaaccacgccgacgcggagtttcaggagcgtcttaaagaagatacgtcttttgggggcaacctcggacgagcagtattccaggcgaaaaagagggttcttgaacctctgggcctggttgaggagcctgttaagacggctccgggaaaaaagaggccggtagagcactctcctgtggagccagactcctcctcgggaaccggaaaagcgggccagcagcctgcaagaaaaagattgaattttggtcagactggagacgcagactccgtacctgacccccagcctctcggacagccaccagcagcccccacaagtttgggatctactacaatggctacaggcagtggcgcaccaatggcagacaataacgagggtgccgatggagtgggtaattcctcaggaaattggcattgcgattcccaatggctgggcgacagagtcatcaccaccagcacccgaacctgggccctgcccacctacaacaaccacctctacaagcaaatctccagccaatcaggagcatcgaacgacaaccactactttggctacagcaccccttgggggtattttgacttcaacagattccactgtcacttctccccacgtgactggcaaagactcatcaacaacaactggggattccgacccaagagactcaacttcaagctctttaacattcaagtcaaagaggtcacgcagaatgacggtacgacgacgattgccaataaccttaccagcacggttcaggtgtttactgactcggagtaccagctcccgtacgtcctcggctcggcgcatcaaggatgcctcccgccgttcccagcagacgtcttcatggtgccacagtatggatacctcaccctgaacaacgggagtcaggcagtaggacgctcttcattttactgcctggagtacttcccttctcagatgctgcgtaccggaaacaactttaccttcagctacacttttgaggacgttcctttccacagcagctacgctcacagccagagtctggaccgtctcatgaatcctctcatcgaccagtacctgtattacttgagcagaacacactccaatagtggaactcaccagcagtcaaggcttcagttttctcaggccggagcgagcatgtcgggaccagctaggaactggcttcctggaccctgttaccgccagcagcgagtatcaaagcagtctgcggataacaacaacagtgaatactcgtggactggagctaccaagtaccgcctcaatggcagagactctctggtgaatccgggctcggccatggcaagccacaaggacgatgaagaaaagtttttcctcatgagcggggttctcatctttgggaagcaaggctcagatgaaaacaatgtggacattgaaaaggtcatgattacagacgaagaggaaatcaggacaaccaatcccgtggctacggagcagtatggttctgtatctaccaacctccaagaggcaaagacaagtccagctaccgcagatgtcaatcaccaaggcgttcttccaggcatggtctggcaggacagagatgtgtaccttcaggggcccatctgggcaaagattccacacacggacggacattttcacccctctcccctcatgggtggattcggacttaaacaccctcctccacagattctcatcaagaacaccccggtacctgcgaatccttcgaccaccttcagtgcggcaaagtttgcttccttcatcacacagtactccacgggacaggtcagcgtggagatcgagtgggagctgcagaaggaaaacagcaaacgctggaatcccgaaattcagtacacttccaactacaacaagtctgttaatgtggactttactgtggacactaatggcgtgtattcagagcctcgccccattggcaccagatacctgactcgtaatctgtaa

SEQ ID NO: 4276 - DNA, 2205 bp, Artificial Sequence
  source: /note="Description of Artificial Sequence: Synthetic polynucleotide"
atggctgccgatggttatcttccagattggctcgaggacactctctctgaaggaataagacagtggtggaagctcaaacctggcccaccaccgccaaagcccgcagagcggcacaaggacgacagtaggggtcttgtgcttcctgggtacaagtacctcggacccttcaacggactcgacaaaggagagccggtcaacgaggcagacgccgcggccctcgagcacgacaaggcctacgaccggcagctcgacagcggagacaacccgtacctcaagtacaaccacgccgacgcggagtttcaggagcgtcttaaagaagatacgtcttttgggggcaacctcggacgagcagtattccaggcgaaaaagagggttcttgaacctctgggcctggttgaggaacctgttaagacggctccgggaaaaaagaggccggtagagcactctcctgtggagccagactcctcctcgggaaccggaaaggcgggccagcagcctgcaagaaaaagattgaattttggtcagactggagacgcagactcagtacctgacccccagcctctcggacagccaccagcagccccctctggtctgggaactaatacgatggctacaggcagtggcgcaccaatggcagacaataacgagggcgccgacggagtgggtaattcctcgggaaattggcattgcgattccacatggatgggcgacagagtcatcaccaccagcacccgaacctgggccctgcccacctacaacaaccacctctacaaacaaatttccagccaatcaggagcctcgaacgacaatcactactttggctacagcaccccttgggggtattttgacttcaacagattccactgccacttttcaccacgtgactggcaaagactcatcaacaacaactggggattccgacccaagagactcaacttcaagctctttaacattcaagtcaaagaggtcacgcagaatgacggtacgacgacgattgccaataaccttaccagcacggttcaggtgtttactgactcggagtaccagctcccgtacgtcctcggctcggcgcatcaaggatgcctcccgccgttcccagcagacgtcttcatggtgccacagtatggatacctcaccctgaacaacgggagtcaggcagtaggacgctcttcattttactgcctggagtacttcccttctcagatgctgcgtaccggaaacaactttaccttcagctacacttttgaggacgttcctttccacagcagctacgctcacagccagagtctggaccgtctcatgaatcctctcatcgaccagtacctgtattacttgagcagaacacactccaatagtggaactcaccagcagtcaaggcttcagttttctcaggccggagcgagcatgtcgggaccagctaggaactggcttcctggaccctgttaccgccagcagcgagtatcaaagcagtctgcggataacaacaacagtgaatactcgtggactggagctaccaagtaccgcctcaatggcagagactctctggtgaatccgggctcggccatggcaagccacaaggacgatgaagaaaagtttttcctcatgagcggggttctcatctttgggaagcaaggctcagatgaaaacaatgtggacattgaaaaggtcatgattacagacgaagaggaaatcaggacaaccaatcccgtggctacggagcagtatggttctgtatctaccaacctccaagaggcaaagacaagtccagctaccgcagatgtcaatcaccaaggcgttcttccaggcatggtctggcaggacagagatgtgtaccttcaggggcccatctgggcaaagattccacacacggacggacattttcacccctctcccctcatgggtggattcggacttaaacaccctcctccacagattctcatcaagaacaccccggtacctgcgaatccttcgaccaccttcagtgcggcaaagtttgcttccttcatcacacagtactccacgggacaggccagcgtggagatcgagtgggagctgcagaaggaaaacagcaaacgctggaatcccgaaattcagtacacttccaactacaacaagtctgttaatgtggactttactgtggacactaatggcgtgtattcagagcctcgccccattggcaccagatacctgactcgtaatctgtaa

SEQ ID NO: 4277 - DNA, 2205 bp, Artificial Sequence
  source: /note="Description of Artificial Sequence: Synthetic polynucleotide"
atggctgccgatggttatcttccagattggctcgaggacactctctctgaaggaataagacagtggtggaagctcaaacctggcccaccaccgccaaagcccgcagagcggcacaaggacgacagtaggggtcttgtgcttcctgggtacaagtacctcggacccttcaacggactcgacaaaggagagccggtcaacgaggcagacgccgcggccctcgagcacgacaaggcctacgaccggcagctcgacagcggagacaacccgtacctcaagtacaaccacgccgacgcggagtttcaggagcgtcttaaagaagatacgtcttttgggggcaacctcggacgagcagtattccaggcgaaaaagagggttcttgaacctctgggcctggttgaggagcctgttaagacggctccgggaaaaaagaggccggtagagcactctcctgtggagccagactcctcctcgggaaccggaaaagcgggccagcagcctgcaagaaaaagattgaattttggtcagactggagacgcagactccgtacctgacccccagcctctcggacagccaccagcagcccccacaagtttgggatctactacaatggctacaggcagtggcgcaccaatggcagacaataacgagggtgccgatggagtgggtaattcctcgggaaattggcattgcgattccacatggatgggcgacagagtcatcaccaccagcacccgaacctgggccctgcccacctacaacaaccacctctacaaacaaatttccagccaatcaggagcctcgaacgacaatcactactttggctacagcaccccttgggggtattttgacttcaacagattccactgccacttttcaccacgtgactggcaaagactcatcaacaacaactggggattccgacccaagagactcaacttcaagctctttaacattcaagtcaaagaggtcacgcagaatgacggtacgacgacgattgccaataaccttaccagcacggttcaggtgtttactgactcggagtaccagctcccgtacgtcctcggctcggcgcatcaaggatgcctcccgccgttcccagcagacgtcttcatggtgccacagtatggatacctcaccctgaacaacgggagtcaggcagtaggacgctcttcattttactgcctggagtacttcccttctcagatgctgcgtaccggaaacaactttaccttcagctacacttttgaggacgttcctttccacagcagctacgctcacagccagagtctggaccgtctcatgaatcctctcatcgaccagtacctgtattacttgagcagaacacactccaatagtggaactcaccagcagtcaaggcttcagttttctcaggccggagcgagcatgtcgggaccagctaggaactggcttcctggaccctgttaccgccagcagcgagtatcaaagcagtctgcggataacaacaacagtgaatactcgtggactggagctaccaagtaccgcctcaatggcagagactctctggtgaatccgggctcggccatggcaagccacaaggacgatgaagaaaagtttttcctcatgagcggggttctcatctttgggaagcaaggctcagatgaaaacaatgtggacattgaaaaggtcatgattacagacgaagaggaaatcaggacaaccaatcccgtggctacggagcagtatggttctgtatctaccaacctccaagaggcaaagacaagtccagctaccgcagatgtcaatcaccaaggcgttcttccaggcatggtctggcaggacagagatgtgtaccttcaggggcccatctgggcaaagattccacacacggacggacattttcacccctctcccctcatgggtggattcggacttaaacaccctcctccacagattctcatcaagaacaccccggtacctgcgaatccttcgaccaccttcagtgcggcaaagtttgcttccttcatcacacagtactccacgggacaggtcagcgtggagatcgagtgggagctgcagaaggaaaacagcaaacgctggaatcccgaaattcagtacacttccaactacaacaagtctgttaatgtggactttactgtggacactaatggcgtgtattcagagcctcgccccattggcaccagatacctgactcgtaatctgtaa

SEQ ID NO: 4278 - DNA, 2205 bp, Artificial Sequence
  source: /note="Description of Artificial Sequence: Synthetic polynucleotide"
atggctgccgatggttatcttccagattggctcgaggacactctctctgaaggaataagacagtggtggaagctcaaacctggcccaccaccaccaaagcccgcagagcggcataaggacgacagcaggggtcttgtgcttcctgggtacaagtacctcggacccttcaacggactcgacaagggagagccggtcaacgaggcagacgccgcggccctcgagcacgacaaagcctacgaccggcagctcgacagcggagacaacccgtacctcaagtacaaccacgccgacgcggagtttcaggagcgccttaaagaagatacgtcttttgggggcaacctcggacgagcagtcttccaggcgaaaaagagggttcttgaacctctgggcctggttgaggaacctgttaagacggctccgggaaaaaagaggccggtagagcactctcctgtggagccagactcctcctcgggaaccggaaaggcgggccagcagcctgcaagaaaaagattgaattttggtcagactggagacgcagactcagtacctgacccccagcctctcggacagccaccagcagccccctctggtctgggaactaatacgatggctacaggcagtggcgcaccaatggcagacaataacgagggcgccgacggagtgggtaattcctcgggaaattggcattgcgattccacatggatgggcgacagagtcatcaccaccagcacccgaacctgggccctgcccacctacaacaaccacctctacaaacaaatttccagccaatcaggagcctcgaacgacaatcactactttggctacagcaccccttgggggtattttgacttcaacagattccactgccacttttcaccacgtgactggcaaagactcatcaacaacaactggggattccgacccaagagactcaacttcaagctctttaacattcaagtcaaagaggtcacgcagaatggcggtacgacgacgattgccaataaccttaccagcacggttcaggtgtttactgactcggagtaccagctcccgtacgtcctcggctcggcgcatcaaggatgcctcccgccgttcccagcagacgtcttcatggtgccacagtatggatacctcaccctgaacaacgggagtcaggcagtaggacgctcttcattttactgcctggagtacttcccttctcagatgctgcgtaccggaaacaactttaccttcagctacacttttgaggacgttcctttccacagcagctacgctcacagccagagtctggaccgtctcatgaatcctctcatcgaccagtacctgtattacttgagcagaacacactccaatagtggaactcaccagcagtcaaggcttcagttttctcaggccggagcgagcatgtcgggaccagctaggaactggcttcctggaccctgttaccgccagcagcgagtatcaaagcagtctgcggataacaacaacagtgaatactcgtggactggagctaccaagtaccgcctcaatggcagagactctctggtgaatccgggctcggccatggcaagccacaaggacgatgaagaaaagtttttcctcatgagcggggttctcatctttgggaagcaaggctcagatgaaaacaatgtggacattgaaaaggtcatgattacagacgaagaggaaatcaggacaaccaatcccgtggctacggagcagtatggttctgtatctaccaacctccaagaggcaaagacaagtccagctaccgcagatgtcaatcaccaaggcgttcttccaggcatggtctggcaggacagagatgtgtaccttcaggggcccatctgggcaaagattccacacacggacggacattttcacccctctcccctcatgggtggattcggacttaaacaccctcctccacagattctcatcaagaacaccccggtacctgcgaatccttcgaccaccttcagtgcggcaaagtttgcttccttcatcacacagtactccacgggacaggtcagcgtggagatcgagtgggagctgcagaaggaaaacagcaaacgctggaatcccgaaattcagtacacttccaactacaacaagtctgttaatgtggactttactgtggacactaatggcgtgtattcagagcctcgccccattggcaccagatacctgactcgtaatctgtaa

SEQ ID NO: 4279 - DNA, 2208 bp, Artificial Sequence
  source: /note="Description of Artificial Sequence: Synthetic polynucleotide"
atggctgccgatggttatcttccagattggctcgaggacactctctctgaaggaataagacagtggtggaagctcaaacctggcccaccaccaccaaagcccgcagagcggcataaggacgacagcaggggtcttgtgcttcctgggtacaagtacctcggacccttcaacggactcgacaagggagagccggtcaacgaggcagacgccgcggccctcgagcacgacaaagcctacgaccggcagctcgacagcggagacaacccgtacctcaagtacaaccacgccgacgcggagtttcaggagcgccttaaagaagatacgtcttttgggggcaacctcggacgagcagtcttccaggcgaaaaagagggttcttgaacctctgggcctggttgaggaacctgttaagacggctccgggaaaaaagaggccggtagagcactctcctgtggagccagactcctcctcgggaaccggaaaggcgggccagcagcctgcaagaaaaagattgaattttggtcagactggagacgcagactcagtacctgacccccagcctctcggacagccaccagcagccccctctggtctgggaactaatacgatggctacaggcagtggcgcaccaatggcagacaataacgagggcgccgacggagtgggtaattcctcgggaaattggcattgcgattccacatggatgggcgacagagtcatcaccaccagcacccgaacctgggccctgcccacctacaacaaccacctctacaaacaaatttccagccaatcaggagcctcgaacgacaatcactactttggctacagcaccccttgggggtattttgacttcaacagattccactgccacttttcaccacgtgactggcaaagactcatcaacaacaactggggattccgacccaggagactcaacttcaagctctttaacattcaagtcaaagaggtcacgcagaatgacggtacgacgacgattgccaataaccttaccagcacggttcaggtgtttactgactcggagtaccagctcccgtacgtcctcggctcggcgcatcaaggatgcctcccgccgttcccagcagacgtcttcatggtgccacagtatggatacctcaccctgaacaacgggagtcaggcagtaggacgctcttcattttactgcctggagtactttccttctcagatgctgcgtaccggaaacaactttaccttcagctacacttttgaggacgttcctttccacagcagctacgctcacagccagagtctggaccgtctcatgaatcctctcatcgaccagtacctgtattacttgagcagaacaaacactccaagtggaaccaccacgcagtcaaggcttcagttttctcaggccggagcgagtgacattcgggaccagtctaggaactggcttcctggaccctgttaccgccagcagcgagtatcaaagacatctgcggataacaacaacagtgaatactcgtggactggagctaccaagtaccacctcaatggcagagactctctggtgaatccgggcccggccatggcaagccacaaggacgatgaagaaaagttttttcctcagagcggggttctcatctttgggaagcaaggctcagagaaaacaaatgtggacattgaaaaggtcatgattacagacgaagaggaaatcaggacaaccaatcccgtggctacggagcagtatggttctgtatctaccaacctccagagaggcaacagacaagcagctaccgcagatgtcaacacacaaggcgttcttccaggcatggtctggcaggacagagatgtgtaccttcaggggcccatctgggcaaagattccacacacggacggacattttcacccctctcccctcatgggtggattcggacttaaacaccctcctccacagattctcatcaagaacaccccggtacctgcgaatccttcgaccaccttcagtgcggcaaagtttgcttccttcatcacacagtactccacgggacaggtcagcgtggagatcgagtgggagctgcagaaggaaaacagcaaacgctggaatcccgaaattcagtacacttccaactacaacaagtctgttaatgtggactttactgtggacactaatggcgtgtattcagagcctcgccccattggcaccagatacctgactcgtaatctgtaa

SEQ ID NO: 4280 - DNA, 2208 bp, Artificial Sequence
  source: /note="Description of Artificial Sequence: Synthetic polynucleotide"
atggctgccgatggttatcttccagattggctcgaggacactctctctgaaggaataagacagtggtggaagctcaaacctggcccaccaccaccaaagcccgcagagcggcataaggacgacagcaggggtcttgtgcttcctgggtacaagtacctcggacccttcaacggactcgacaagggagagccggtcaacgaggcagacgccgcggccctcgagcacgacaaagcctacgaccggcagctcgacagcggagacaacccgtacctcaagtacaaccacgccgacgcggagtttcaggagcgccttaaagaagatacgtcttttgggggcaacctcggacgagcagtcttccaggcgaaaaagagggttcttgaacctctgggcctggttgaggaacctgttaagacggctccgggaaaaaagaggccggtagagcactctcctgtggagccagactcctcctcgggaaccggaaaggcgggccagcagcctgcaagaaaaagattgaattttggtcagactggagacgcagactcagtacctgacccccagcctctcggacagccaccagcagccccctctggtctgggaactaatacgatggctacaggcagtggcgcaccaatggcagacaataacgagggcgccgacggagtgggtaattcctcgggaaattggcattgcgattccacatggatgggcgacagagtcatcaccaccagcacccgaacctgggccctgcccacctacaacaaccacctctacaaacaaatttccagccaatcaggagcctcgaacgacaatcactactttggctacagcaccccttgggggtattttgacttcaacagattccactgccacttttcaccacgtgactggcaaagactcatcaacaacaactggggattccgacccaagagactcaacttcaagctctttaacattcaagtcaaagaggtcacgcagaatgacggtacgacgacgattgccaataaccttaccagcacggttcaggtgtttactgactcggagtaccagctcccgtacgtcctcggctcggcgcatcaaggatgcctcccgccgttcccagcagacgtcttcatggtgccacagtatggatacctcaccctgaacaacgggagtcaggcagtaggacgctcttcattttactgcctggagtactttccttctcagatgctgcgtaccggaaacaactttaccttcagctacacttttgaggacgttcctttccacagcagctacgctcgcagccagagtctggaccgtctcatgaatcctctcatcgaccagtacctgtattacttgagcagaacaaacactccaagtggaaccaccacgcagtcaaggcttcagttttctcaggccggagcgagtgacattcgggaccagtctaggaactggcttcctggaccctgttaccgccagcagcgagtatcaaagacatctgcggataacaacaacagtgaatactcgtggactggagctaccaagtaccacctcaatggcagagactctctggtgaatccgggcccggccatggcaagccacaaggacgatgaagaaaagttttttcctcagagcggggttctcatctttgggaagcaaggctcagagaaaacaaatgtggacattgaaaaggtcatgattacagacgaagaggaaatcaggacaaccaatcccgtggctacggagcagtatggttctgtatctaccaacctccagagaggcaacagacaagcagctaccgcagatgtcaacacacaaggcgttcttccaggcatggtctggcaggacagagatgtgtaccttcaggggcccatctgggcaaagattccacacacggacggacattttcacccctctcccctcatgggtggattcggacttaaacaccctcctccacagattctcatcaagaacaccccggtacctgcgaatccttcgaccaccttcagtgcggcaaagtttgcttccttcatcacacagtactccacgggacaggtcagcgtggagatcgagtgggagctgcagaaggaaaacagcaaacgctggaatcccgaaattcagtacacttccaactacaacaagtctgttaatgtggactttactgtggacactaatggcgtgtattcagagcctcgccccattggcaccagatacctgactcgtaatctgtaa

SEQ ID NO: 4281 - DNA, 2208 bp, Artificial Sequence
  source: /note="Description of Artificial Sequence: Synthetic polynucleotide"
atggctgccgatggttatcttccagattggctcgaggacactctctctgaaggaataagacagtggtggaagctcaaacctggcccaccaccaccaaagcccgcagagcggcataaggacgacagcaggggtcttgtgcttcctgggtacaagtacctcggacccttcaacggactcgacaagggagagccggtcaacgaggcagacgccgcggccctcgagcacgacaaagcctacgaccggcagctcgacagcggagacaacccgtacctcaagtacaaccacgccgacgcggagtttcaggagcgccttaaagaagatacgtcttttgggggcaacctcggacgagcagtcttccaggcgaaaaagagggttcttgaacctctgggcctggttgaggaacctgttaagacggctccgggaaaaaagaggccggtagagcactctcctgtggagccagactcctcctcgggaaccggaaaggcgggccagcagcctgcaagaaaaagattgaattttggtcagactggagacgcagactcagtacctgacccccagcctctcggacagccaccagcagccccctctggtctgggaactaatacgatggctacaggcagtggcgcaccaatggcagacaataacgagggcgccgacggagtgggtaattcctcgggaaattggcattgcgattccacatggatgggcgacagagtcatcaccaccagcacccgaacctgggccctgcccacctacaacaaccacctctacaaacaaatttccagccaatcaggagcctcgaacgacaatcactactttggctacagcaccccttgggggtattttgacttcaacagattccactgccacttttcaccacgtgactggcaaagactcatcaacaacaactggggattccgacccaagagactcaacttcaagctctttaacattcaagtcaaagaggtcacgcagaatgacggtacgacgacgattgccaataaccttaccagcacggttcaggtgtttactgactcggagtaccagctcccgtacgtcctcggctcggcgcatcaaggatgcctcccgccgttcccagcagacgtcttcatggtgccacagtatggatacctcaccctgaacaacgggagtcaggcagtaggacgctcttcattttactgcctggagtactttccttctcagatgctgcgtaccggaaacaactttaccttcagctacacttttgaggacgttcctttccacagcagctacgctcacagccagagtctggaccgtctcatgaatcctctcatcgaccagtacctgtattacttgagcagaacaaacactccaagtggaaccaccacgcagtcaaggcttcagttttctcaggccggagcgagtgacattcgggaccagtctaggaactggcttcctggaccctgttaccgccagcagcgagtatcaaagacatctgcggataacaacaacagtgaatactcgtggactggagttaccaagtaccacctcaatggcagagactctctggtgaatccgggcccggccatggcaagccacaaggacgatgaagaaaagttttttcctcagagcggggttctcatctttgggaagcaaggctcagagaaaacaaatgtggacattgaaaaggtcatgattacagacgaagaggaaatcaggacaaccaatcccgtggctacggagcagtatggttctgtatctaccaacctccagagaggcaacagacaagcagctaccgcagatgtcaacacacaaggcgttcttccaggcatggtctggcaggacagagatgtgtaccttcaggggcccatctgggcaaagattccacacacggacggacattttcacccctctcccctcatgggtggattcggacttaaacaccctcctccacagattctcatcaagaacaccccggtacctgcgaatccttcgaccaccttcagtgcggcaaagtttgcttccttcatcacacagtactccacgggacaggtcagcgtggagatcgagtgggagctgcagaaggaaaacagcaaacgctggaatcccgaaattcagtacacttccaactacaacaagtctgttaatgtggactttactgtggacactaatggcgtgtattcagagcctcgccccattggcaccagatacctgactcgtaatctgtaa

SEQ ID NO: 4282 - DNA, 2208 bp, Artificial Sequence
  source: /note="Description of Artificial Sequence: Synthetic polynucleotide"
atggctgccgatggttatcttccagattggctcgaggacactctctctgaaggaataagacagtggtggaagctcaaacctggcccaccaccaccaaagcccgcagagcggcataaggacgacagcaggggtcttgtgcttcctgggtacaagtacctcggacccttcaacggactcgacaagggagagccggtcaacgaggcagacgccgcggccctcgagcacgacaaagcctacgaccggcagctcgacagcggagacaacccgtaccccaagtacaaccacgccgacgcggagtttcaggagcgccttaaagaagatacgtcttttgggggcaacctcggacgagcagtcttccaggcgaaaaagagggttcttgaacctctgggcctggttgaggaacctgttaagacggctccgggaaaaaagaggccggtagagcactctcctgtggagccagactcctcctcgggaaccggaaaggcgggccagcagcctgcaagaaaaagattgaattttggtcagactggagacgcagactcagtacctgacccccagcctctcggacagccaccagcagccccctctggtctgggaactaatacgatggctacaggcagtggcgcaccaatggcagacaataacgagggcgccgacggagtgggtaattcctcgggaaattggcattgcgattccacatggatgggcgacagagtcatcaccaccagcacccgaacctgggccctgcccacctacaacaaccacctctacaaacaaatttccagccaatcaggagcctcgaacgacaatcactactttggctacagcaccccttgggggtattttgacttcaacagattccactgccacttttcaccacgtgactggcaaagactcatcaacaacaactggggattccgacccaagagactcaacttcaagctctttaacattcaagtcaaagaggtcacgcagaatgacggtacgacgacgattgccaataaccttaccagcacggttcaggtgtttactgactcggagtaccagctcccgtacgtcctcggctcggcgcatcaaggatgcctcccgccgttcccagcagacgtcttcatggtgccacagtatggatacctcaccctgaacaacgggagtcaggcagtaggacgctcttcattttactgcctggagtactttccttctcagatgctgcgtaccggaaacaactttaccttcagctacacttttgaggacgttcctttccacagcagctacgctcacagccagagtctggaccgtctcatgaatcctctcatcgaccagtacctgtattacttgagcagaacaaacactccaagtggaaccaccacgcagtcaaggcttcagttttctcaggccggagcgagtgacattcgggaccagtctaggaactggcttcctggaccctgttaccgccagcagcgagtatcaaagacatctgcggataacaacaacagtgaatactcgtggactggagctaccaagtaccacctcaatggcagagactctctggtgaatccgggcccggccatggcaagccacaaggacgatgaagaaaagttttttcctcagagcggggttctcatctttgggaagcaaggctcagagaaaacaaatgtggacattgaaaaggtcatgattacagacgaagaggaaatcaggacaaccaatcccgtggctacggagcagtatggttctgtatctaccaacctccagagaggcaacagacaagcagctaccgcagatgtcaacacacaaggcgttcttccaggcatggtctggcaggacagagatgtgtaccttcaggggcccatctgggcaaagattccacacacggacggacattttcacccctctcccctcatgggtggattcggacttaaacaccctcctccacagattctcatcaagaacaccccggtacctgcgaatccttcgaccaccttcagtgcggcaaagtttgcttccttcatcacacagtactccacgggacaggtcagcgtggagatcgagtgggagctgcagaaggaaaacagcaaacgctggaatcccgaaattcagtacacttccaactacaacaagtctgttaatgtggactttactgtggacactaatggcgtgtattcagagcctcgccccattggcaccagatacctgactcgtaatctgtaa

SEQ ID NO: 4283 - DNA, 2208 bp, Artificial Sequence
  source: /note="Description of Artificial Sequence: Synthetic polynucleotide"
atggctgccgatggttatcttccagattggctcgaggacactctctctgaaggaataagacagtggtggaagctcaaacctggcccaccaccaccaaagcccgcagagcggcataaggacgacagcaggggtcttgtgcttcctgggtacaagtacctcggacccttcaacggactcgacaagggagagccggtcaacgaggcagacgccgcggccctcgagcacgacaaagcctacgaccggcagctcgacagcggagacaacccgtacctcaagtacaaccacgccgacgcggagtttcaggagcgccttaaagaagatacgtcttttgggggcaacctcggacgagcagtcttccaggcgaaaaagagggttcttgaacctctgggcctggttgaggaacctgttaagacggctccgggaaaaaagaggccggtagagcactctcctgtggagccagactcctcctcgggaaccggaaaggcgggccagcagcctgcaagaaaaagattgaattttggtcagactggagacgcagactcagtacctgacccccagcctctcggacagccaccagcagccccctctggtctgggaactaatacgatggctacaggcagtggcgcaccaatggcagacaataacgagggcgccgacggagtgggtaattcctcgggaaattggcattgcgattccacatggatgggcgacagagtcatcaccaccagcacccgaacctgggccctgcccacctacaacaaccacctctacaaacaaatttccagccaatcaggagcctcgaacgacaatcactactttggctacagcaccccttgggggtattttgacttcaacagattccactgccacttttcaccacgtgactggcaaagactcatcaacaacaactggggattccgacccaagagactcaacttcaagctctttaacattcaagtcaaagaggtcacgcagaatgacggtacgacgacgattgccaataaccttaccagcacggttcaggtgtttactgactcggagtaccagctcccgtacgtcctcggctcggcgcatcaaggatgcctcccgccgttcccagcagacgtcttcatggtgccacagtatggatacctcaccctgaacaacgggagtcaggcagtaggacgctcttcattttactgcctggagtactttccttctcagatgctgcgtaccggaaacaactttaccttcagctacacttttgaggacgttcctttccacagcagctacgctcacagccagagtctggaccgtctcatgaatcctctcatcgaccagtacctgtattacttgagcagaacaaacactccaagtggaaccaccacgcagtcaaggcttcagttttctcaggccggagcgagtgacattcgggaccagtctaggaactggcttcctggaccctgttaccgccagcagcgagtatcaaagacatctgcggataacaacaacagtgaatactcgtggactggagctaccaagtaccacctcaatggcagagactctctggtgaatccgggcccggccatggcaagccacaaggacgatgaagaaaagttttttcctcagagcggggttcccatctttgggaagcaaggctcagagaaaacaaatgtggacattgaaaaggtcatgattacagacgaagaggaaatcaggacaaccaatcccgtggctacggagcagtatggttctgtatctaccaacctccagagaggcaacagacaagcagctaccgcagatgtcaacacacaaggcgttcttccaggcatggtctggcaggacagagatgtgtaccttcaggggcccatctgggcaaagattccacacacggacggacattttcacccctctcccctcatgggtggattcggacttaaacaccctcctccacagattctcatcaagaacaccccggtacctgcgaatccttcgaccaccttcagtgcggcaaagtttgcttccttcatcacacagtactccacgggacaggtcagcgtggagatcgagtgggagctgcagaaggaaaacagcaaacgctggaatcccgaaattcagtacacttccaactacaacaagtctgttaatgtggactttactgtggacactaatggcgtgtattcagagcctcgccccattggcaccagatacctgactcgtaatctgtaa

SEQ ID NO: 4284 - DNA, 2208 bp, Artificial Sequence
  source: /note="Description of Artificial Sequence: Synthetic polynucleotide"
atggctgccgatggttatcttccagattggctcgaggacactctctctgaaggaataagacagtggtggaagctcaaacctggcccaccaccaccaaagcccgcagagcggcataaggacgacagcaggggtcttgtgcttcctgggtacaagtacctcggacccttcaacggactcgacaagggagagccggtcaacgaggcagacgccgcggccctcgagcacgacaaagcctacgaccggcagctcgacagcggagacaacccgtacctcaagtacaaccacgccgacgcggagtttcaggagcgccttaaagaagatacgtcttttgggggcaacctcggacgagcagtcttccaggcgaaaaagagggttcttgaacctctgggcctggttgaggaacctgttaagacggctccgggaaaaaagaggccggtagagcactctcctgtggagccagactcctcctcgggaaccggaaaggcgggccagcagcctgcaagaaaaagattgaattttggtcagactggagacgcagactcagtacctgacccccagcctctcggacagccaccagcagccccccctggtctgggaactaatacgatggctacaggcagtggcgcaccaatggcagacaataacgagggcgccgacggagtgggtaattcctcgggaaattggcattgcgattccacatggatgggcgacagagtcatcaccaccagcacccgaacctgggccctgcccacctacaacaaccacctctacaaacaaatttccagccaatcaggagcctcgaacgacaatcactactttggctacagcaccccttgggggtattttgacttcaacagattccactgccacttttcaccacgtgactggcaaagactcatcaacaacaactggggattccgacccaagagactcaacttcaagctctttaacattcaagtcaaagaggtcacgcagaatgacggtacgacgacgattgccaataaccttaccagcacggttcaggtgtttactgactcggagtaccagctcccgtacgtcctcggctcggcgcatcaaggatgcctcccgccgttcccagcagacgtcttcatggtgccacagtatggatacctcaccctgaacaacgggagtcaggcagtaggacgctcttcattttactgcctggagtactttccttctcagatgctgcgtaccggaaacaactttaccttcagctacacttttgaggacgttcctttccacagcagctacgctcacagccagagtctggaccgtctcatgaatcctctcatcgaccagtacctgtattacttgagcagaacaaacactccaagtggaaccaccacgcagtcaaggcttcagttttctcaggccggagcgagtgacattcgggaccagtctaggaactggcttcctggaccctgttaccgccagcagcgagtatcaaagacatctgcggataacaacaacagtgaatactcgtggactggagctaccaagtaccacctcaatggcagagactctctggtgaatccgggcccggccatggcaagccacaaggacgatgaagaaaagttttttcctcagagcggggttctcatctttgggaagcaaggctcagagaaaacaaatgtggacattgaaaaggtcatgattacagacgaagaggaaatcaggacaaccaatcccgtggctacggagcagtatggttctgtatctaccaacctccagagaggcaacagacaagcagctaccgcagatgtcaacacacaaggcgttcttccaggcatggtctggcaggacagagatgtgtaccttcaggggcccatctgggcaaagattccacacacggacggacattttcacccctctcccctcatgggtggattcggacttaaacaccctcctccacagattctcatcaagaacaccccggtacctgcgaatccttcgaccaccttcagtgcggcaaagtttgcttccttcatcacacagtactccacgggacaggtcagcgtggagatcgagtgggagctgcagaaggaaaacagcaaacgctggaatcccgaaattcagtacacttccaactacaacaagtctgttaatgtggactttactgtggacactaatggcgtgtattcagagcctcgccccattggcaccagatacctgactcgtaatctgtaa

SEQ ID NO: 4285 - DNA, 2208 bp, Artificial Sequence
  source: /note="Description of Artificial Sequence: Synthetic polynucleotide"
atggctgccgatggttatcttccagattggctcgaggacactctctctgaaggaataagacagtggtggaagctcaaacctggcccaccaccaccaaagcccgcagagcggcataaggacgacagcaggggtcttgtgcttcctgggtacaagtacctcggacccttcaacggactcgacaagggagagccggtcaacgaggcagacgccgcggccctcgagcacgacaaagcctacgaccggcagctcgacagcggagacaacccgtacctcaagtacaaccacgccgacgcggagtttcaggagcgccttaaagaagatacgtcttttgggggcaacctcggacgagcagtcttccaggcgaaaaagagggttcttgaacctctgggcctggttgaggaacctgttaagacggctccgggaaaaaagaggccggtagagcactctcctgtggagccagactcctcctcgggaaccggaaaggcgggccagcagcctgcaagaaaaagattgaattttggtcagactggagacgcagactcagtacctgacccccagcctctcggacagccaccagcagccccctctggtctgggaactaatacgatggctacaggcagtggcgcaccaatggcagacaataacgagggcgccgacggagtgggtaattcctcgggaaattggcattgcgattccacatggatgggcgacagagtcatcaccaccagcacccgaacctgggccctgcccacctacaacaaccacctctacaaacaaatttccagccaatcaggagcctcgaacgacaatcactactttggctacagcaccccttgggggtattttgacttcaacagattccactgccacttttcaccacgtgactggcaaagactcatcaacaacaactggggattccgacccaagagactcaacttcaagctctttaacattcaagtcaaagaggtcacgcagaatgacggtacgacgacgattgccaataaccttaccagcacggttcaggtgtttactgactcggagtaccagctcccgtacgtcctcggctcggcgcatcaaggatgcctcccgccgttcccagcagacgtcttcatggtgccacagtatggatacctcaccctgaacaacgggagtcaggcagtaggacgctcttcattttactgcctggagtactttccttctcagatgctgcgtaccggaaacaactttaccttcagctacacttttgaggacgttcctttccacagcagctacgctcacagccagagtctggaccgtctcatgaatcctctcatcgaccagtacctgtattacttgagcagaacaaacactccaagtggaaccaccacgcagtcaaggcttcagttttctcaggccggagcgagtgacattcgggaccagtctaggaactggcttcctggaccctgttaccgccagcagcgagtatcaaagacatctgcggataacaacaacagtgaatactcgtggactggagctaccaagtaccacctcaatggcagagactctctggtgaatccgggcccggccatggcaagccacaaggacgatgaagaaaagttttttcctcagagcgggattctcatctttgggaagcaaggctcagagaaaacaaatgtggacattgaaaaggtcatgattacagacgaagaggaaatcaggacaaccaatcccgtggctacggagcagtatggttctgtatctaccaacctccagagaggcaacagacaagcagctaccgcagatgtcaacacacaaggcgttcttccaggcatggtctggcaggacagagatgtgtaccttcaggggcccatctgggcaaagattccacacacggacggacattttcacccctctcccctcatgggtggattcggacttaaacaccctcctccacagattctcatcaagaacaccccggtacctgcgaatccttcgaccaccttcagtgcggcaaagtttgcttccttcatcacacagtactccacgggacaggtcagcgtggagatcgagtgggagctgcagaaggaaaacagcaaacgctggaatcccgaaattcagtacacttccaactacaacaagtctgttaatgtggactttactgtggacactaatggcgtgtattcagagcctcgccccattggcaccagatacctgactcgtaatctgtaa

SEQ ID NO: 4286 - DNA, 2208 bp, Artificial Sequence
  source: /note="Description of Artificial Sequence: Synthetic polynucleotide"
atggctgccgatggttatcttccagattggctcgaggacactctctctgaaggaataagacagtggtggaagctcaaacctggcccaccaccaccaaagcccgcagagcggcataaggacgacagcaggggtcttgtgcttcctgggtacaagtacctcggacccttcaacggactcgacaagggagagccggtcaacgaggcagacgccgcggccctcgagcacgacaaagcctacgaccggcagctcgacagcggagacaacccgtacctcaagtacaaccacgccgacgcggagtttcaggagcgccttaaagaagatacgtcttttgggggcaacctcggacgagcagtcttccaggcgaaaaagagggttcttgaacctctgggcctggttgaggaacctgttaagacggctccgggaaaaaagaggccggtagagcactctcctgtggagccagactcctcctcgggaaccggaaaggcgggccagcagcctgcaagaaaaagattgaattttggtcagactggagacgcagactcagtacctgacccccagcctctcggacagccaccagcagccccctctggtctgggaactaatacgatggctacaggcagtggcgcaccaatggcagacaataacgagggcgccgacggagtgggtaattcctcgggaaattggcattgcgattccacatggatgggcgacagagtcatcaccaccagcacccgaacctgggccctgcccacctacaacaaccacctctacaaacaaatttccagccaatcaggagcctcgaacgacaatcactactttggctacagcaccccttgggggtattttgacttcaacagattccactgccacttttcaccacgtgactggcaaagactcatcaacaacaactggggattccgacccaagagactcaacttcaagctctttaacattcaagtcaaagaggtcacgcagaatgacggtacgacgacgattgccaataaccttaccagcacggttcaggtgtttactgactcggagtaccagctcccgtacgtcctcggctcggcgcatcaaggatgcctcccgccgttcccagcagacgtcttcatggtgccacagtatggatacctcaccctgaacaacgggagtcaggcagtaggacgctcttcattttactgcctggagtactttccttctcagatgctgcgtaccggaaacaactttaccttcagctacacttttgaggacgttcctttccacagcagctacgctcacagccagagtctggaccgtctcatgaatcctctcatcgaccagtacctgtattacttgagcagaacaaacactccaagtggaaccaccacgcagtcaaggcttcagttttctcaggccggagcgagtgacattcgggaccagtctaggaactggcttcctggaccctgttaccgccagcagcgagtatcaaagacatctgcggataacaacaacagtgaatactcgtggactggagctaccaagtaccacctcaatggcagagactctctggtgaatccgggcccggccatggcaagccacaaggacgatgaagaaaagttttttcctcagagcggggttctcatctttgggaagcaaggctcagagaaaacaaatgtggacattgaaaaggtcatgattacagacgaagaggaaatcaggacaaccaatcccgtggctacggagcagtatggttctgtatctaccaacctccagagaggcaacagacaagcagctaccgcagatgtcaacacacaaggcgttcttccaggcatggtctggcaggacagagatgtgtaccttcaggggcccatctgggcaaagattccacacacggacggacattttcacccctctcccctcatgggtggattcggacttaaacaccctcctccacagattctcatcaagaacaccccggtacctgcgaatccttcgaccaccttcagtgcggcaaagtttgcttccttcatcacacagtactccacgggacaggtcagcgtggagatcgagtgggagctgcagaaggaaaacagcaaacgctggaatcccgaaattcagtgcacttccaactacaacaagtctgttaatgtggactttactgtggacactaatggcgtgtattcagagcctcgccccattggcaccagatacctgactcgtaatctgtaa

SEQ ID NO: 4287 - DNA, 2208 bp, Artificial Sequence
  source: /note="Description of Artificial Sequence: Synthetic polynucleotide"
atggctgccgatggttatcttccagattggctcgaggacactctctctgaaggaataagacagtggtggaagctcaaacctggcccaccaccaccaaagcccgcagagcggcataaggacgacagcaggggtcttgtgcttcctgggtacaagtacctcggacccttcaacggactcgacaagggagagccggtcaacgaggcagacgccgcggccctcgagcacgacaaagcctacgaccggcagctcgacagcggagacaacccgtacctcaagtacaaccacgccgacgcggagtttcaggagcgccttaaagaagatacgtcttttgggggcaacctcggacgagcagtcttccaggcgaaaaagagggttcttgaacctctgggcctggttgaggaacctgttaagacggctccgggaaaaaagaggccggtagagcactctcctgtggagccagactcctcctcgggaaccggaaaggcgggccagcagcctgcaagaaaaagattgaattttggtcagactggagacgcagactcagtacctgacccccagcctctcggacagccaccagcagccccctctggtctgggaactaatacgatggctacaggcagtggcgcaccaatggcagacaataacgagggcgccgacggagtgggtaattcctcgggaaattggcattgcgattccacatggatgggcgacagagtcatcaccaccagcacccgaacctgggccctgcccacctacaacaaccacctctacaaacaaatttccagccaatcaggagcctcgaacgacaatcactactttggctacagcaccccttgggggtattttgacttcaacagattccactgccacttttcaccacgcgactggcaaagactcatcaacaacaactggggattccgacccaagagactcaacttcaagctctttaacattcaagtcaaagaggtcacgcagaatgacggtacgacgacgattgccaataaccttaccagcacggttcaggtgtttactgactcggagtaccagctcccgtacgtcctcggctcggcgcatcaaggatgcctcccgccgttcccagcagacgtcttcatggtgccacagtatggatacctcaccctgaacaacgggagtcaggcagtaggacgctcttcattttactgcctggagtactttccttctcagatgctgcgtaccggaaacaactttaccttcagctacacttttgaggacgttcctttccacagcagctacgctcacagccagagtctggaccgtctcatgaatcctctcatcgaccagtacctgtattacttgagcagaacaaacactccaagtggaaccaccacgcagtcaaggcttcagttttctcaggccggagcgagtgacattcgggaccagtctaggaactggcttcctggaccctgttaccgccagcagcgagtatcaaagacatctgcggataacaacaacagtgaatactcgtggactggagctaccaagtaccacctcaatggcagagactctctggtgaatccgggcccggccatggcaagccacaaggacgatgaagaaaagttttttcctcagagcggggttctcatctttgggaagcaaggctcagagaaaacaaatgtggacattgaaaaggtcatgattacagacgaagaggaaatcaggacaaccaatcccgtggctacggagcagtatggttctgtatctaccaacctccagagaggcaacagacaagcagctaccgcagatgtcaacacacaaggcgttcttccaggcatggtctggcaggacagagatgtgtaccttcaggggcccatctgggcaaagattccacacacggacggacattttcacccctctcccctcatgggtggattcggacttaaacaccctcctccacagattctcatcaagaacaccccggtacctgcgaatccttcgaccaccttcagtgcggcaaagtttgcttccttcatcacacggtactccacgggacaggtcagcgtggagatcgagtgggagctgcagaaggaaaacagcaaacgctggaatcccgaaattcagtacacttccaactacaacaagtctgttaatgtggactttactgtggacactaatggcgtgtattcagagcctcgccccattggcaccagatacctgactcgtaatctgtaa

SEQ ID NO: 4288 - DNA, 2208 bp, Artificial Sequence
  source: /note="Description of Artificial Sequence: Synthetic polynucleotide"
atggctgccgatggttatcttccagattggctcgaggacactctctctgaaggaataagacagtggtggaagctcaaacctggcccaccaccaccaaagcccgcagagcggcataaggacgacagcaggggtcttgtgcttcctgggtacaagtacctcggacccttcaacggactcgacaagggagagccggtcaacgaggcagacgccgcggccctcgagcacgacaaagcctacgaccggcagctcgacagcggagacaacccgtacctcaagtacaaccacgccgacgcggagtttcgggagcgccttaaagaagatacgtcttttgggggcaacctcggacgagcagtcttccaggcgaaaaagagggttcttgaacctctgggcctggttgaggaacctgttaagacggctccgggaaaaaagaggccggtagagcactctcctgtggagccagactcctcctcgggaaccggaaaggcgggccagcagcctgcaagaaaaagattgaattttggtcagactggagacgcagactcagtacctgacccccagcctctcggacagccaccagcagccccctctggtctgggaactaatacgatggctacaggcagtggcgcaccaatggcagacaataacgagggcgccgacggagtgggtaattcctcgggaaattggcattgcgattccacatggatgggcgacagagtcatcaccaccagcacccgaacctgggccctgcccacctacaacaaccacctctacaaacaaatttccagccaatcaggagcctcgaacgacaatcactactttggctacagcaccccttgggggtattttgacttcaacagattccactgccacttttcaccacgtgactggcaaagactcatcaacaacaactggggattccgacccaagagactcaacttcaagctctttaacattcaagtcaaagaggtcacgcagaatgacggtacgacgacgattgccaataaccttaccagcacggttcaggtgtttactgactcggagtaccagctcccgtacgtcctcggctcggcgcatcaaggatgcctcccgccgttcccagcagacgtcttcatggtgccacagtatggatacctcaccctgaacaacgggagtcaggcagtaggacgctcttcattttactgcctggagtactttccttctcagatgctgcgtaccggaaacaactttaccttcagctacacttttgaggacgttcctttccacagcagctacgctcacagccagagtctggaccgtctcatgaatcctctcatcgaccagtacctgtattacttgagcagaacaaacactccaagtggaaccaccacgcagtcaaggcttcagttttctcaggccggagcgagtgacattcgggaccagtctaggaactggcttcctggaccctgttaccgccagcagcgagtatcaaagacatctgcggataacaacaacagtgaatactcgtggactggagctaccaagtaccacctcaatggcagagactctctggtgaatccgggcccggccatggcaagccacaaggacgatgaagaaaagttttttcctcagagcggggttctcatctttgggaagcaaggctcagagaaaacaaatgtggacattgaaaaggtcatgattacagacgaagaggaaatcaggacaaccaatcccgtggctacggagcagtatggttctgtatctaccaacctccagagaggcaacagacaagcagctaccgcagatgtcaacacacaaggcgttcttccaggcatggtctggcaggacagagatgtgtaccttcaggggcccatctgggcaaagattccacacacggacggacattttcacccctctcccctcatgggtggattcggacttaaacaccctcctccacagattctcatcaagaacaccccggtacctgcgaatccttcgaccaccttcagtgcggcaaagtttgcttccttcatcacacagtactccacgggacaggtcagcgtggagatcgagtgggagctgcagaaggaaaacagcaaacgctggaatcccgaaattcagtacacttccaactacaacaagtctgttaatgtggactttactgtggacactaatggcgtgtattcagagcctcgccccattggcaccagatacctgactcgtaatctgtaa

SEQ ID NO: 4289 - DNA, 2208 bp, Artificial Sequence
  source: /note="Description of Artificial Sequence: Synthetic polynucleotide"
atggctgccgatggttatcttccagattggctcgaggacactctctctgaaggaataagacagtggtggaagctcaaacctggcccaccaccaccaaagcccgcagagcggcataaggacgacagcaggggtcttgtgcttcctgggtacaagtacctcggacccttcaacggactcgacaagggagagccggtcaacgaggcagacgccgcggccctcgagcacgacaaagcctacgaccggcagctcgacagcggagacaacccgtacctcaagcacaaccacgccgacgcggagtttcaggagcgccttaaagaagatacgtcttttgggggcaacctcggacgagcagtcttccaggcgaaaaagagggttcttgaacctctgggcctggttgaggaacctgttaagacggctccgggaaaaaagaggccggtagagcactctcctgtggagccagactcctcctcgggaaccggaaaggcgggccagcagcctgcaagaaaaagattgaattttggtcagactggagacgcagactcagtacctgacccccagcctctcggacagccaccagcagccccctctggtctgggaactaatacgatggctacaggcagtggcgcaccaatggcagacaataacgagggcgccgacggagtgggtaattcctcgggaaattggcattgcgattccacatggatgggcgacagagtcatcaccaccagcacccgaacctgggccctgcccacctacaacaaccacctctacaaacaaatttccagccaatcaggagcctcgaacgacaatcactactttggctacagcaccccttgggggtattttgacttcaacagattccactgccacttttcaccacgtgactggcaaagactcatcaacaacaactggggattccgacccaagagactcaacttcaagctctttaacattcaagtcaaagaggtcacgcagaatgacggtacgacgacgattgccaataaccttaccagcacggttcaggtgtttactgactcggagtaccagctcccgtacgtcctcggctcggcgcatcaaggatgcctcccgccgttcccagcagacgtcttcatggtgccacagtatggatacctcaccctgaacaacgggagtcaggcagtaggacgctcttcattttactgcctggagtactttccttctcagatgctgcgtaccggaaacaactttaccttcagctacacttttgaggacgttcctttccacagcagctacgctcacagccagagtctggaccgtctcatgaatcctctcatcgaccagtacctgtattacttgagcagaacaaacactccaagtggaaccaccacgcagtcaaggcttcagttttctcaggccggagcgagtgacattcgggaccagtctaggaactggcttcctggaccctgttaccgccagcagcgagtatcaaagacatctgcggataacaacaacagtgaatactcgtggactggagctaccaagtaccacctcaatggcagagactctctggtgaatccgggcccggccatggcaagccacaaggacgatgaagaaaagttttttcctcagagcggggttctcatctttgggaagcaaggctcagagaaaacaaatgtggacattgaaaaggtcatgattacagacgaagaggaaatcaggacaaccaatcccgtggctacggagcagtatggttctgtatctaccaacctccagagaggcaacagacaagcagctaccgcagatgtcaacacacaaggcgttcttccaggcatggtctggcaggacagagatgtgtaccttcaggggcccatctgggcaaagattccacacacggacggacattttcacccctctcccctcatgggtggattcggacttaaacaccctcctccacagattctcatcaagaacaccccggtacctgcgaatccttcgaccaccttcagtgcggcaaagtttgcttccttcatcacacagtactccacgggacaggtcagcgtggagatcgagtgggagctgcagaaggaaaacagcaaacgctggaatcccgaaattcagtacacttccaactacaacaagtctgttaatgtggactttactgtggacactaatggcgtgtattcagagcctcgccccattggcaccagatacctgactcgtaatctgtaa

SEQ ID NO: 4290 - DNA, 2208 bp, Artificial Sequence
  source: /note="Description of Artificial Sequence: Synthetic polynucleotide"
atggctgccgatggttatcttccagattggctcgaggacactctctctgaaggaataagacagtggtggaagctcaaacctggcccaccaccaccaaagcccgcagagcggcataaggacgacagcaggggtcttgtgcttcctgggtacaagtacctcggacccttcaacggactcgacaagggagagccggtcaacgaggcagacgccgcggccctcgagcacgacaaagcctacgaccggcagctcgacagcggagacaacccgtacctcaagtacaaccacgccgacgcggagtttcaggagcgccttaaagaagatacgtcttttgggggcaacctcggacgagcagtcttccaggcgaaaaagagggttcttgaacctctgggcctggttgaggaacctgttaagacggctccgggaaaaaagaggccggtagagcactctcctgtggagccagactcctcctcgggaaccggaaaggcgggccagcagcctgcaagaaaaagattgaattttggtcagactggagacgcagactcagtacctgacccccagcctctcggacagccaccagcagccccctctggtctgggaactaatacgatggctacaggcagtggcgcaccaatggcagacaataacgagggcgccgacggagtgggtaattcctcgggaaattggcattgcgattccacatggatgggcgacagagtcatcaccaccagcacccgaacctgggccctgcccacctacaacaaccacctctacaaacaaatttccagccaatcaggagcctcgaacgacaatcactactttggctacagcaccccttgggggtattttgacttcaacagattccactgccacttttcaccacgtgactggcaaagactcatcaacaacaactggggattccgacccaagagactcaacttcaagctctttaacattcaagtcaaagaggtcacgcagaatgacggtacgacgacgattgccaataaccttaccagcacggttcaggtgtttactgactcggagtaccagctcccgtacgtcctcggctcggcgcatcaaggatgcctcccgccgttcccagcagacgtcttcatggtgccacagtatggatacctcaccctgaacaacgggagtcgggcagtaggacgctcttcattttactgcctggagtactttccttctcagatgctgcgtaccggaaacaactttaccttcagctacacttttgaggacgttcctttccacagcagctacgctcacagccagagtctggaccgtctcatgaatcctctcatcgaccagtacctgtattacttgagcagaacaaacactccaagtggaaccaccacgcagtcaaggcttcagttttctcaggccggagcgagtgacattcgggaccagtctaggaactggcttcctggaccctgttaccgccagcagcgagtatcaaagacatctgcggataacaacaacagtgaatactcgtggactggagctaccaagtaccacctcaatggcagagactctctggtgaatccgggcccggccatggcaagccacaaggacgatgaagaaaagttttttcctcagagcggggttctcatctttgggaagcaaggctcagagaaaacaaatgtggacattgaaaaggtcatgattacagacgaagaggaaatcaggacaaccaatcccgtggctacggagcagtatggttctgtatctaccaacctccagagaggcaacagacaagcagctaccgcagatgtcaacacacaaggcgttcttccaggcatggtctggcaggacagagatgtgtaccttcaggggcccatctgggcaaagattccacacacggacggacattttcacccctctcccctcatgggtggattcggacttaaacaccctcctccacagattctcatcaagaacaccccggtacctgcgaatccttcgaccaccttcagtgcggcaaagtttgcttccttcatcacacagtactccacgggacaggtcagcgtggagatcgagtgggagctgcagaaggaaaacagcaaacgctggaatcccgaaattcagtacacttccaactacaacaagtctgttaatgtggactttactgtggacactaatggcgtgtattcagagcctcgccccattggcaccagatacctgactcgtaatctgtaa

SEQ ID NO: 4291 - DNA, 2208 bp, Artificial Sequence
  source: /note="Description of Artificial Sequence: Synthetic polynucleotide"
atggctgccgatggttatcttccagattggctcgaggacactctctctgaaggaataagacagtggtggaagctcaaacctggcccaccaccaccaaagcccgcagagcggcataaggacgacagcaggggtcttgtgcttcctgggtacaagtacctcggacccttcaacggactcgacaagggagagccggtcaacgaggcagacgccgcggccctcgagcacgacaaagcctacgaccggcagctcgacagcggagacaacccgtacctcaagtacaaccacgccgacgcggagtttcaggagcgccttaaagaagatacgtcttttgggggcaacctcggacgagcagtcttccaggcgaaaaagagggttcttgaacctctgggcctggttgaggaacctgttaagacggctccgggaaaaaagaggccggtagagcactctcctgtggagccagactcctcctcgggaaccggaaaggcgggccagcagcctgcaagaaaaagattgaattttggtcagactggagacgcagactcagtacctgacccccagcctctcggacagccaccagcagccccctctggtctgggaactaatacgatggctacaggcagtggcgcaccaatggcagacaataacgagggcgccgacggagtgggtaattcctcgggaaattggcattgcgattccacatggatgggcgacagagtcatcaccaccagcacccgaacctgggccctgcccacctacaacaaccacctctacaaacaaatttccagccaatcaggagcctcgaacgacaatcactactttggctacagcaccccttgggggtattttgacttcaacagattccactgccacttttcaccacgtgactggcaaagactcatcaacaacaactggggattccgacccaagagactcaacttcaagctctttaacattcaagtcaaagaggtcacgcagaatgacggtacgacgacgattgccaataaccttaccagcacggttcaggtgtttactgactcggagtaccagctcccgtacgtcctcggctcggcgcatcaaggatgcctcccgccgttcccagcagacgtcttcatggtgccacagtatggatacctcaccctgaacaacgggagtcaggcagtaggacgctcttcattttactgcctggagtactttccttctcagatgctgcgtaccggaaacaactttaccttcagctacacttttgaggacgttcctttccacagcagctacgctcacagccagagtctggaccgtctcatgaatcctctcatcgaccagtacctgtattacttgagcagaacaaacactccaagtggaaccaccacgcagtcaaggcttcagttttctcaggccggagcgagtgacattcgggaccagtctaggaactggcttcctggaccctgttaccgccagcagcgagtatcaaagacatctgcggataacaacaacagtgaatactcgtggactggagctaccaagtaccacctcaatggcagagactctctggtgaatccgggcccggccatggcaagccacaaggacgatgaagaaaagttttttcctcagagcggggttctcatctttgggaagcaaggctcagagaaaacaaatgtggacattgaaaaggtcgtgattacagacgaagaggaaatcaggacaaccaatcccgtggctacggagcagtatggttctgtatctaccaacctccagagaggcaacagacaagcagctaccgcagatgtcaacacacaaggcgttcttccaggcatggtctggcaggacagagatgtgtaccttcaggggcccatctgggcaaagattccacacacggacggacattttcacccctctcccctcatgggtggattcggacttaaacaccctcctccacagattctcatcaagaacaccccggtacctgcgaatccttcgaccaccttcagtgcggcaaagtttgcttccttcatcacacagtactccacgggacaggtcagcgtggagatcgagtgggagctgcagaaggaaaacagcaaacgctggaatcccgaaattcagtacacttccaactacaacaagtctgttaatgtggactttactgtggacactaatggcgtgtattcagagcctcgccccattggcaccagatacctgactcgtaatctgtaa

SEQ ID NO: 4292 - DNA, 2208 bp, Artificial Sequence
  source: /note="Description of Artificial Sequence: Synthetic polynucleotide"
atggctgccgatggttatcttccagattggctcgaggacactctctctgaaggaataagacagtggtggaagctcaaacctggcccaccaccaccaaagcccgcagagcggcataaggacgacagcaggggtcttgtgcttcctgggtacaagtacctcggacccttcaacggactcgacaagggagagccggtcaacgaggcagacgccgcggccctcgagcacgacaaagcctacgaccggcagctcgacagcggagacaacccgtacctcaagtacaaccacgccgacgcggagtttcaggagcgccttaaagaagatacgtcttttgggggcaacctcggacgagcagtcttccaggcgaaaaagagggttcttgaacctctgggcctggttgaggaacctgttaagacggctccgggaaaaaagaggccggtagagcactctcctgtggagccagactcctcctcgggaaccggaaaggcgggccagcagcctgcaagaaaaagattgaattttggtcagactggagacgcagactcagtacctgacccccagcctctcggacagccaccagcagccccctctggtctgggaactaatacgatggctacaggcagtggcgcaccaatggcagacaataacgagggcgccgacggagtgggtaattcctcgggaaattggcattgcgattccacatggatgggcgacagagtcatcaccaccagcacccgaacctgggccctgcccacctacaacaaccacctctacaaacaaatttccagccaatcaggagcctcgaacgacaatcactactttggctacagcaccccttgggggtattttgacttcaacagattccactgccacttttcaccacgtgactggcaaagactcatcaacaacaactggggattccgacccaagagactcaacttcaagctctttaacattcaagtcaaagaggtcacgcagaatgacggtacgacgacgattgccaataaccttaccagcacggttcaggtgtttactgactcggagtaccagctcccgtacgtcctcggctcggcgcatcaaggatgcctcccgccgttcccagcagacgtcttcatggtgccacagtatggatacctcaccctgaacaacgggagtcaggcagtaggacgctcttcattttactgcctggagtactttccttctcagatgctgcgtaccggaaacaactttaccttcagccacacttttgaggacgttcctttccacagcagctacgctcacagccagagtctggaccgtctcatgaatcctctcatcgaccagtacctgtattacttgagcagaacaaacactccaagtggaaccaccacgcagtcaaggcttcagttttctcaggccggagcgagtgacattcgggaccagtctaggaactggcttcctggaccctgttaccgccagcagcgagtatcaaagacatctgcggataacaacaacagtgaatactcgtggactggagctaccaagtaccacctcaatggcagagactctctggtgaatccgggcccggccatggcaagccacaaggacgatgaagaaaagttttttcctcagagcggggttctcatctttgggaagcaaggctcagagaaaacaaatgtggacattgaaaaggtcatgattacagacgaagaggaaatcaggacaaccaatcccgtggctacggagcagtatggttctgtatctaccaacctccagagaggcaacagacaagcagctaccgcagatgtcaacacacaaggcgttcttccaggcatggtctggcaggacagagatgtgtaccttcaggggcccatctgggcaaagattccacacacggacggacattttcacccctctcccctcatgggtggattcggacttaaacaccctcctccacagattctcatcaagaacaccccggtacctgcgaatccttcgaccaccttcagtgcggcaaagtttgcttccttcatcacacagtactccacgggacaggtcagcgtggagatcgagtgggagctgcagaaggaaaacagcaaacgctggaatcccgaaattcagtacacttccaactacaacaagtctgttaatgtggactttactgtggacactaatggcgtgtattcagagcctcgccccattggcaccagatacctgactcgtaatctgtaa

SEQ ID NO: 4293 - DNA, 2208 bp, Artificial Sequence
  source: /note="Description of Artificial Sequence: Synthetic polynucleotide"
atggctgccgatggttatcttccagattggctcgaggacactctctctgaaggaataagacagtggtggaagctcaaacctggcccaccaccaccaaagcccgcagagcggcataaggacgacagcaggggtcttgtgcttcctgggtacaagtacctcggacccttcaacggactcgacaagggagagccggtcaacgaggcagacgccgcggccctcgagcacgacaaagcctacgaccggcagctcgacagcggagacaacccgtacctcaagtacaaccacgccgacgcggagtttcaggagcgccttaaagaagatacgtcttttgggggcaacctcggacgagcagtcttccaggcgaaaaagagggttcttgaacctctgggcctggttgaggaacctgttaagacggctccgggaaaaaagaggccggtagagcactctcctgtggagccagactcctcctcgggaaccggaaaggcgggccagcagcctgcaagaaaaagattgaattttggtcagactggagacgcagactcagtacctgacccccagcctctcggacagccaccagcagccccctctggtctgggaactaatacgatggctacaggcagtggcgcaccaatggcagacaataacgagggcgccgacggagtgggtaattcctcgggaaattggcattgcgattccacatggatgggcggcagagtcatcaccaccagcacccgaacctgggccctgcccacctacaacaaccacctctacaaacaaatttccagccaatcaggagcctcgaacgacaatcactactttggctacagcaccccttgggggtattttgacttcaacagattccactgccacttttcaccacgtgactggcaaagactcatcaacaacaactggggattccgacccaagagactcaacttcaagctctttaacattcaagtcaaagaggtcacgcagaatgacggtacgacgacgattgccaataaccttaccagcacggttcaggtgtttactgactcggagtaccagctcccgtacgtcctcggctcggcgcatcaaggatgcctcccgccgttcccagcagacgtcttcatggtgccacagtatggatacctcaccctgaacaacgggagtcaggcagtaggacgctcttcattttactgcctggagtactttccttctcagatgctgcgtaccggaaacaactttaccttcagctacacttttgaggacgttcctttccacagcagctacgctcacagccagagtctggaccgtctcatgaatcctctcatcgaccagtacctgtattacttgagcagaacaaacactccaagtggaaccaccacgcagtcaaggcttcagttttctcaggccggagcgagtgacattcgggaccagtctaggaactggcttcctggaccctgttaccgccagcagcgagtatcaaagacatctgcggataacaacaacagtgaatactcgtggactggagctaccaagtaccacctcaatggcagagactctctggtgaatccgggcccggccatggcaagccacaaggacgatgaagaaaagttttttcctcagagcggggttctcatctttgggaagcaaggctcagagaaaacaaatgtggacattgaaaaggtcatgattacagacgaagaggaaatcaggacaaccaatcccgtggctacggagcagtatggttctgtatctaccaacctccagagaggcaacagacaagcagctaccgcagatgtcaacacacaaggcgttcttccaggcatggtctggcaggacagagatgtgtaccttcaggggcccatctgggcaaagattccacacacggacggacattttcacccctctcccctcatgggtggattcggacttaaacaccctcctccacagattctcatcaagaacaccccggtacctgcgaatccttcgaccaccttcagtgcggcaaagtttgcttccttcatcacacagtactccacgggacaggtcagcgtggagatcgagtgggagctgcagaaggaaaacagcaaacgctggaatcccgaaattcagtacacttccaactacaacaagtctgttaatgtggactttactgtggacactaatggcgtgtattcagagcctcgccccattggcaccagatacctgactcgtaatctgtaa

SEQ ID NO: 4294 - DNA, 2208 bp, Artificial Sequence
  source: /note="Description of Artificial Sequence: Synthetic polynucleotide"
atggctgccgatggttatcttccagattggctcgaggacactctctctgaaggaataagacagtggtggaagctcaaacctggcccaccaccaccaaagcccgcagagcggcataaggacgacagcaggggtcttgtgcttcctgggtacaagtacctcggacccttcaacggactcgacaagggagagccggtcaacgaggcagacgccgcggccctcgagcacgacaaagcctacgaccggcagctcgacagcggagacaacccgtacctcaagtacaaccacgccgacgcggagtttcaggagcgccttaaagaagatacgtcttttgggggcaacctcggacgagcagtcttccaggcgaaaaagagggttcttgaacctctgggcctggttgaggaacctgttaagacggctccgggaaaaaagaggccggtagagcactctcctgtggagccagactcctcctcgggaaccggaaaggcgggccagcagcctgcaagaaaaagattgaattttggtcagactggagacgcagactcagtacctgacccccagcctctcggacagccaccagcagccccctctggtctgggaactaatacgatggctacaggcagtggcgcaccaatggcagacaataacgagggcgccgacggagtgggtaattcctcgggaaattggcattgcgattccacatggatgggcgacagagtcatcaccaccagcacccgaacctgggccctgcccacctacaacaaccacctctacaaacaaatttccagccaatcaggagcctcgaacgacaatcactactttggctacagcaccccttgggggtattttgacttcaacagattccactgccacttttcaccacgtgactggcaaagactcatcaacaacaactggggattccgacccaagagacccaacttcaagctctttaacattcaagtcaaagaggtcacgcagaatgacggtacgacgacgattgccaataaccttaccagcacggttcaggtgtttactgactcggagtaccagctcccgtacgtcctcggctcggcgcatcaaggatgcctcccgccgttcccagcagacgtcttcatggtgccacagtatggatacctcaccctgaacaacgggagtcaggcagtaggacgctcttcattttactgcctggagtactttccttctcagatgctgcgtaccggaaacaactttaccttcagctacacttttgaggacgttcctttccacagcagctacgctcacagccagagtctggaccgtctcatgaatcctctcatcgaccagtacctgtattacttgagcagaacaaacactccaagtggaaccaccacgcagtcaaggcttcagttttctcaggccggagcgagtgacattcgggaccagtctaggaactggcttcctggaccctgttaccgccagcagcgagtatcaaagacatctgcggataacaacaacagtgaatactcgtggactggagctaccaagtaccacctcaatggcagagactctctggtgaatccgggcccggccatggcaagccacaaggacgatgaagaaaagttttttcctcagagcggggttctcatctttgggaagcaaggctcagagaaaacaaatgtggacattgaaaaggtcatgactacagacgaagaggaaatcaggacaaccaatcccgtggctacggagcagtatggttctgtatctaccaacctccagagaggcaacagacaagcagctaccgcagatgtcaacacacaaggcgttcttccaggcatggtctggcaggacagagatgtgtaccttcaggggcccatctgggcaaagattccacacacggacggacattttcacccctctcccctcatgggtggattcggacttaaacaccctcctccacagattctcatcaagaacaccccggtacctgcgaatccttcgaccaccttcagtgcggcaaagtttgcttccttcatcacacagtactccacgggacaggtcagcgtggagatcgagtgggagctgcagaaggaaaacagcaaacgctggaatcccgaaattcagtacacttccaactacaacaagtctgttaatgtggactttactgtggacactaatggcgtgtattcagagcctcgccccattggcaccagatacctgactcgtaatctgtaa

SEQ ID NO: 4295 - DNA, 2208 bp, Artificial Sequence
  source: /note="Description of Artificial Sequence: Synthetic polynucleotide"
atggctgccgatggttatcttccagattggctcgaggacactctctctgaaggaataagacagtggtggaagctcaaacctggcccaccaccaccaaagcccgcagagcggcataaggacgacagcaggggtcttgtgcttcctgggtacaagtacctcggacccttcaacggactcgacaagggagagccggtcaacgaggcagacgccgcggccctcgagcacgacaaagcctacgaccggcagctcgacagcggagacaacccgtacctcaagtacaaccacgccgacgcggagtttcgggagcgccttaaagaagatacgtcttttgggggcaacctcggacgagcagtcttccaggcgaaaaagagggttcttgaacctctgggcctggttgaggaacctgttaagacggctccgggaaaaaagaggccggtagagcactctcctgtggagccagactcctcctcgggaaccggaaaggcgggccagcagcctgcaagaaaaagattgaattttggtcagactggagacgcagactcagtacctgacccccagcctctcggacagccaccagcagccccctctggtctgggaactaatacgatggctacaggcagtggcgcaccaatggcagacaataacgagggcgccgacggagtgggtaattcctcgggaaattggcattgcgattccacatggatgggcgacagagtcatcaccaccagcacccgaacctgggccctgcccacctacaacaaccacctctacaaacaaatttccagccaatcaggagcctcgaacgacaatcactactttggctacagcaccccttgggggtattttgacttcaacagattccactgccacttttcaccacgtgactggcaaagactcatcaacaacaactggggattccgacccaagagactcaacttcaagctctttaacattcaagtcaaagaggtcacgcagaatgacggtacgacgacgattgccaataaccttaccagcacggttcaggtgtttactgactcggagtaccagctcccgtacgtcctcggctcggcgcatcaaggatgcctcccgccgttcccagcagacgtcttcatggtgccacagtatggatacctcaccctgaacaacgggagtcaggcagtaggacgctcttcattttactgcctggagtactttccttctcagatgctgcgtaccggaaacaactttaccttcagctacacttttgaggacgttcctttccacagcagctacgctcacagccagagtctggaccgtctcatgaatcctctcatcgaccagtacctgtattacttgagcagaacaaacactccaagtggaaccaccacgcagtcaaggcttcagttttctcaggccggagcgagtgacattcgggaccagtctaggaactggcttcctggaccctgttaccgccagcagcgagtatcaaagacatctgcggataacaacaacagtgaatactcgtggactggagctaccaagtaccacctcaatggcagagactctctggtgaatccgggcccggccatggcaagccacaaggacgatgaagaaaagttttttcctcagagcggggttctcatctttgggaagcaaggctcagagaaaacaaatgtggacattgaaaaggtcatgactacagacgaagaggaaatcaggacaaccaatcccgtggctacggagcagtatggttctgtatctaccaacctccagagaggcaacagacaagcagctaccgcagatgtcaacacacaaggcgttcttccaggcatggtctggcaggacagagatgtgtaccttcaggggcccatctgggcaaagattccacacacggacggacattttcacccctctcccctcatgggtggattcggacttaaacaccctcctccacagattctcatcaagaacaccccggtacctgcgaatccttcgaccaccttcagtgcggcaaagtttgcttccttcatcacacagtactccacgggacaggtcagcgtggagatcgagtgggagctgcagaaggaaaacagcaaacgctggaatcccgaaattcagtacacttccaactacaacaagtctgttaatgtggactttactgtggacactaatggcgtgtattcagagcctcgccccattggcaccagatacctgactcgtaatctgtaa

SEQ ID NO: 4296 - DNA, 2208 bp, Artificial Sequence
  source: /note="Description of Artificial Sequence: Synthetic polynucleotide"
atggctgccgatggttatcttccagattggctcgaggacactctctctgaaggaataagacagtggtggaagctcaaacctggcccaccaccaccaaagcccgcagagcggcataaggacgacagcaggggtcttgtgcttcctgggtacaagtacctcggacccttcaacggactcgacaagggagagccggtcaacgaggcagacgccgcggccctcgagcacgacaaagcctacgaccggcagctcgacagcggagacaacccgtacctcaagtacaaccacgccgacgcggagtttcaggagcgccttaaagaagatacgtcttttgggggcaacctcggacgagcagtcttccaggcgaaaaagagggttcttgaacctctgggcctggttgaggaacctgttaagacggctccgggaaaaaagaggccggtagagcactctcctgtggagccagacccctcctcgggaaccggaaaggcgggccagcagcctgcaagaaaaagattgaattttggtcagactggagacgcagactcagtacctgacccccagcctctcggacagccaccagcagccccctctggtctgggaactaatacgatggctacaggcagtggcgcaccaatggcagacaataacgagggcgccgacggagtgggtaattcctcgggaaattggcattgcgattccacatggatgggcgacagagtcatcaccaccagcacccgaacctgggccctgcccacctacaacaaccacctctacaaacaaatttccagccaatcaggagcctcgaacgacaatcactactttggctacagcaccccttgggggtattttgacttcaacagattccactgccacttttcaccacgtgactggcaaagactcatcaacaacaactggggattccgacccaagagactcaacttcaagctctttaacattcaagtcaaagaggtcacgcagaatgacggtacgacgacgattgccaataaccttaccagcacggttcaggtgtttactgactcggagtaccagctcccgtacgtcctcggctcggcgcatcaaggatgcctcccgccgttcccagcagacgtcttcatggtgccacagtatggatacctcaccctgaacaacgggagtcaggcagtaggacgctcttcattttactgcctggagtactttccttctcagatgctgcgtaccggaaacaactttaccttcagctacacttttgaggacgttcctttccacagcagctacgctcacagccagagtctggaccgtctcatgaatcccctcatcgaccagtacctgtattacttgagcagaacaaacactccaagtggaaccaccacgcagtcaaggcttcagttttctcaggccggagcgagtgacattcgggaccagtctaggaactggcttcctggaccctgttaccgccagcagcgagtatcaaagacatctgcggataacaacaacagtgaatactcgtggactggagctaccaagtaccacctcaatggcagagactctctggtgaatccgggcccggccatggcaagccacaaggacgatgaagaaaagttttttcctcagagcggggttctcatctttgggaagcaaggctcagagaaaacaaatgtggacattgaaaaggtcatgattacagacgaagaggaaatcaggacaaccaatcccgtggctacggagcagtatggttctgtatctaccaacctccagagaggcaacagacaagcagctaccgcagatgtcaacacacaaggcgttcttccaggcatggtctggcaggacagagatgtgtaccttcaggggcccatctgggcaaagattccacacacggacggacattttcacccctctcccctcatgggtggattcggacttaaacaccctcctccacagattctcatcaagaacaccccggtacctgcgaatccttcgaccaccttcagtgcggcaaagtttgcttccttcatcacacagtactccacgggacaggtcagcgtggagatcgagtgggagctgcagaaggaaaacagcaaacgctggaatcccgaaattcagtacacttccaactacaacaagtctgttaatgtggactttactgtggacactaatggcgtgtattcagagcctcgccccattggcaccagatacctgactcgtaatctgtaa

SEQ ID NO: 4297 - DNA, 2208 bp, Artificial Sequence
  source: /note="Description of Artificial Sequence: Synthetic polynucleotide"
atggctgccgatggttatcttccagattggctcgaggacactctctctgaaggaataagacagtggtggaagctcaaacctggcccaccaccaccaaagcccgcagagcggcataaggacgacagcaggggtcttgtgcttcctgggtacaagtacctcggacccttcaacggactcgacaagggagagccggtcaacgaggcagacgccgcggccctcgagcacgacaaagcctacgaccggcagctcgacagcggagacaacccgtacctcaagtacaaccacgccgacgcggagtttcaggagcgccttaaagaagatacgtcttttgggggcaacctcggacgagcagtcttccaggcgaaaaagagggttcttgaacctctgggcctggttgaggaacctgttaagacggctccgggaaaaaagaggccggtagagcactctcctgtggagccagactcctcctcgggaaccggaaaggcgggccagcagcctgcaagaaaaagattgaattttggtcagactggagacgcagactcagtacctgacccccagcctctcggacagccaccagcagccccctctggtctgggaactaatacgatggctacaggcagtggcgcaccaatggcagacaataacgagggcgccgacggagtgggtaattcctcgggaaattggcattgcgattccacatggatgggcgacagagtcatcaccaccagcacccgaacctgggccctgcccacctacaacaaccacctctacaaacaaatttccagccaatcaggagcctcgaacgacaatcactactttggctacagcaccccttgggggtattttgacttcaacagattccactgccacttttcaccacgtgactggcaaagactcatcaacaacaactggggattccgacccaagagactcaacttcaagctctttaacattcaagtcaaagaggtcacgcagaatgacggtacgacgacgattgccaataaccttaccagcacggttcaggtgtttactgactcggagtaccagctcccgtacgtcctcggctcggcgcatcaaggatgcctcccgccgttcccagcagacgtcttcatggtgccacagtatggatacctcaccctgaacaacgggagtcaggcagtaggacgctcttcattttactgcctggagtactttccttctcagatgctgcgtaccggaaacaactttaccttcagctacacttttgaggacgttcctttccacagcagctacgctcacagccagagtctggaccgtctcatgaatcctctcatcgaccagtacctgtattacttgagcagaacaaacactccaagtggaaccaccacgcagtcaaggcttcagttttctcaggccggagcgagtgacattcgggaccagtctaggaactggcttcctggaccctgttaccgccagcagcgagtatcaaagacatctgcggataacaacaacagtgaatactcgtggactggagctaccaagtaccacctcaatggcagagactctctggtgaatccgggcccggccatggcaagccacaaggacgatgaagaaaagttttttcctcagagcggggttctcatctttgggaagcaaggctcagagaaaacaaatgtggacattgaaaaggtcatgattacagacgaagaggaaatcaggacaaccaatcccgtggctacggagcagtatggttctgtatctaccaacctccagagaggcaacagacaagcagctaccgcagatgtcaacacacaaggcgttcttccaggcatggtctggcaggacagagatgtgtaccttcaggggcccatctgggcaaagattccacacacggacggacattttcacccctctcccctcatgggtggattcggacttaaacaccctcctccacagattctcatcaagaacaccccggtacctgcgaatccttcgaccaccttcagtgcggcaaagtttgcttccttcatcacacagtactccacgggacaggtcagcgtggagatcgagtgggagctgcagaaggaaaacagcaaacgctggaatcccgaaattcagtacacttccaactacaacaagtctgttaatgtggactttactgtggacactaatggcgtgtattcagagtctcgccccattggcaccagatacctgactcgtaatctgtaa

SEQ ID NO: 4298 - DNA, 2208 bp, Artificial Sequence
  source: /note="Description of Artificial Sequence: Synthetic polynucleotide"
atggctgccgatggttatcttccagattggctcgaggacactctctctgaaggaataagacagtggtggaagctcaaacctggcccaccaccaccaaagcccgcagagcggcataaggacgacagcaggggtcttgtgcttcctgggtacaagtacctcggacccttcaacggactcgacaagggagagccggtcaacgaggcagacgccgcggccctcgagcacgacaaagcctacgaccggcagctcgacagcggagacaacccgtacctcaagtacaaccacgccgacgcggagtttcaggagcgccttaaagaagatacgtcttttgggggcaacctcggacgagcagtcttccaggcgaaaaagagggttcttgaacctctgggcctggttgaggaacctgttaagacggctccgggaaaaaagaggccggtagagcactctcctgtggagccagactcctcctcgggaaccggaaaggcgggccagcagcctgcaagaaaaagattgaattttggtcagactggagacgcagactcagtacctgacccccagcctctcggacagccaccagcagccccctctggtctgggaactaatacgatggctacaggcagtggcgcaccaatggcagacaataacgagggcgccgacggagtgggtaattcctcgggaaattggcattgcgattccacatggatgggcgacagagtcatcaccaccagcacccgaacctgggccctgcccacctacaacaaccacctctacaaacaaatttccagccaatcaggagcctcgaacgacaatcactactttggctacagcaccccttgggggtattttgacttcaacagattccactgccacttttcaccacgtgactggcaaagactcatcaacaacaactggggattccgacccaagagactcaacttcaagctctttaacattcaagtcaaagaggtcacgcagaatgacggtacgacgacgattgccaataaccttaccagcacggttcaggtgtttactgactcggagtaccagctcccgtacgtcctcggctcggcgcatcaaggatgcctcccgccgttcccagcagacgtcttcatggtgccacagtatggatacctcaccccgaacaacgggagtcaggcagtaggacgctcttcattttactgcctggagtactttccttctcagatgctgcgtaccggaaacaactttaccttcagctacacttttgaggacgttcctttccacagcagctacgctcacagccagagtctggaccgtctcatgaatcctctcatcgaccagtacctgtattacttgagcagaacaaacactccaagtggaaccaccacgcagtcaaggcttcagttttctcaggccggagcgagtgacattcgggaccagtctaggaactggcttcctggaccctgttaccgccagcagcgagtatcaaagacatctgcggataacaacaacagtgaatactcgtggactggagctaccaagtaccacctcaatggcagagactctctggtgaatccgggcccggccatggcaagccacaaggacgatgaagaaaagttttttcctcagagcggggttctcatctttgggaagcaaggctcagagaaaacaaatgtggacattgaaaaggtcatgattacagacgaagaggaaatcaggacaaccaatcccgtggctacggagcagtatggttctgtatctaccaacctccagagaggcaacagacaagcagctaccgcagatgtcaacacacaaggcgttcttccaggcatggtctggcaggacagagatgtgtaccttcaggggcccatctgggcaaagattccacacacggacggacattttcacccctctcccctcatgggtggattcggacttaaacaccctcctccacagattctcatcaagaacaccccggtacctgcgaatccttcgaccaccttcagtgcggcaaagtttgcttccttcatcacacagtactccacgggacaggtcagcgtggagatcgagtgggagctgcagaaggaaaacagcaaacgctggaatcccgaaattcagtacacttccaactacaacaagtctgttaatgtggactttactgtggacactaatggcgtgtattcagagcctcgccccattggcaccagatacctgactcgtaatctgtaa

SEQ ID NO: 4299 - DNA, 2208 bp, Artificial Sequence
  source: /note="Description of Artificial Sequence: Synthetic polynucleotide"
atggctgccgatggttatcttccagattggctcgaggacactctctctgaaggaataagacagtggtggaagctcaaacctggcccaccaccaccaaagcccgcagagcggcataaggacgacagcaggggtcttgtgcttcctgggtacaagtacctcggacccttcaacggactcgacaagggagagccggtcaacgaggcagacgccgcggccctcgagcacgacaaagcctacgaccggcagctcgacagcggagacaacccgtacctcaagtacaaccacgccgacgcggagtttcaggagcgccttaaagaagatacgtcttttgggggcaacctcggacgagcagtcttccaggcgaaaaagagggttcttgaacctctgggcctggttgaggaacctgttaagacggctccgggaaaaaagaggccggtagagcactctcctgtggagccagactcctcctcgggaaccggaaaggcgggccagcagcctgcaagaaaaagattgaattttggtcagactggagacgcagactcagtacctgacccccagcctctcggacagccaccagcagccccctctggtctgggaactaatacgatggctacaggcagtggcgcaccaatggcagacaataacgagggcgccgacggagtgggtaattcctcgggaaattggcattgcgattccacatggatgggcgacagagtcatcaccaccagcacccgaacctgggccctgcccacctacaacaaccacctctacaaacaaatttccagccaatcaggagcctcgaacgacaatcactactttggctacagcaccccttgggggtattttgacttcaacagattccactgccacttttcaccacgtgactggcaaagactcatcaacaacaactggggattccgacccaagagactcaacttcaagctctttaacattcaagtcaaagaggtcacgcagaatgacggtacgacgacgattgccaataaccttaccagcacggttcaggtgtttactgactcggagtaccagctcccgtacgtcctcggctcggcgcatcaaggatgcctcccgccgttcccagcagacgtcttcatggtgccacagtatggatacctcaccctgaacaacgggagtcaggcagtaggacgctcttcattttactgcctggagtactttccttctcagatgctgcgtaccggaaacaactttaccttcagctacacttttgaggacgttcctttccacagcagctacgctcacagccagagtctggaccgtctcatgaatcctctcatcgaccagtacctgtattacttgagcagaacaaacactccaagtggaaccaccacgcagtcaaggcttcagttttctcaggccggagcgagtgacattcgggaccagtctaggaactggcttcctggaccctgttaccgccagcagcgagtatcaaagacatctgcggataacaacaacagtgaatactcgtggactggagctaccaagtaccacctcaatggcagagactctctggtgaatccgggcccggccatggcaagccacaaggacgatgaagaaaagttttttcctcagagcggggttctcatctttgggaagcaaggctcagagaaaacaaatgtggacattgaaaaggtcatgattacagacgaagaggaaatcaggacaaccaatcccgtggctacggagcagtatggttctgtatctaccaacctccagagaggcaacagacaagcagctaccgcagatgtcaacacacaaggcgttcttccaggcatggcctggcaggacagagatgtgtaccttcaggggcccatctgggcaaagattccacacacggacggacattttcacccctctcccctcatgggtggattcggacttaaacaccctcctccacagattctcatcaagaacaccccggtacctgcgaatccttcgaccaccttcagtgcggcaaagtttgcttccttcatcacacagtactccacgggacaggtcagcgtggagatcgagtgggagctgcagaaggaaaacagcaaacgctggaatcccgaaattcagtacacttccaactacaacaagtctgttaatgtggactttactgtggacactaatggcgtgtattcagagcctcgccccattggcaccagatacctgactcgtaatctgtaa

SEQ ID NO: 4300 - DNA, 2208 bp, Artificial Sequence
  source: /note="Description of Artificial Sequence: Synthetic polynucleotide"
atggctgccgatggttatcttccagattggctcgaggacactctctctgaaggaataagacagtggtggaagctcaaacctggcccaccaccgccaaagcccgcagagcggcacaaggacgacagtaggggtcttgtgcttcctgggtacaagtacctcggacccttcaacggactcgacaaaggagagccggtcaacgaggcagacgccgcggccctcgagcacgacaaggcctacgaccggcagctcgacagcggagacaacccgtacctcaagtacaaccacgccgacgcggagtttcaggagcgtcttaaagaagatacgtcttttgggggcaacctcggacgagcagtattccaggcgaaaaagagggttcttgaacctctgggcctggttgaggagcctgttaagacggctccgggaaaaaagaggccggtagagcactctcctgtggagccagactcctcctcgggaaccggaaaagcgggccagcagcctgcaagaaaaagattgaattttggtcagactggagacgcagactccgtacctgacccccagcctctcggacagccaccagcagcccccacaagtttgggatctactacaatggctacaggcagtggcgcaccaatggcagacaataacgagggtgccgatggagtgggtaattcctcaggaaattggcattgcgattcccaatggctgggcgacagagtcatcaccaccagcacccgaacctgggccctgcccacctacaacaaccacctctacaagcaaatctccagccaatcaggagcatcgaacgacaaccactactttggccacagcaccccttgggggtattttgacttcaacagattccactgtcacttctccccacgtgactggcaaagactcatcaacaacaactggggattccgacccaagagactcaacttcaagctctttaacattcaagtcaaagaggtcacgcagaatgacggtacgacgacgattgccaataaccttaccagcacggttcaggtgtttactgactcggagtaccagctcccgtacgtcctcggctcggcgcatcaaggatgcctcccgccgttcccagcagacgtcttcatggtcccacagtatggatacctcaccctgaacaacgggagtcaggcggtaggacgctcttccttttactgcctggagtactttccttctcagatgctgcgtaccggaaacaactttaccttcagctacacttttgaggacgttcctttccacagcagctacgctcacagccagagtctggaccgtctcatgaatcctctcatcgaccagtacctgtattacttgagcagaacaaacactccaagtggaaccaccacgcagtcaaggcttcagttttctcaggccggagcgagtgacattcgggaccagtctaggaactggcttcctggaccctgttaccgccagcagcgagtatcaaagacatctgcggataacaacaacagtgaatactcgtggactggagctaccaagtaccacctcaatggcagagactctctggtgaatccgggcccggccatggcaagccacaaggacgatgaagaaaagttttttcctcagagcggggttctcatctttgggaagcaaggctcagagaaaacaaatgtggacattgaaaaggtcatgattacagacgaagaggaaatcaggacaaccaatcccgtggctacggagcagtatggttctgtatctaccaacctccagagaggcaacagacaagcagctaccgcagatgtcaacacacaaggcgttcttccaggcatggtctggcaggacagagatgtgtaccttcaggggcccatctgggcaaagattccacacacggacggacattttcacccctctcccctcatgggtggattcggacttaaacaccctcctccacagattctcatcaagaacaccccggtacctgcgaatccttcgaccaccttcagtgcggcaaagtttgcttccttcatcacacagtactccacgggacaggtcagcgtggagatcgagtgggagctgcagaaggaaaacagcaaacgctggaatcccgaaattcagtacacttccaactacaacaagtctgttaatgtggactttactgtggacactaatggcgtgtattcagagcctcgccccattggcaccagatacctgactcgtaatctgtaa

SEQ ID NO: 4301 - DNA, 2208 bp, Artificial Sequence
  source: /note="Description of Artificial Sequence: Synthetic polynucleotide"
atggctgccgatggttatcttccagattggctcgaggacactctctctgaaggaataagacagtggtggaagctcaaacctggcccaccaccaccaaagcccgcagagcggcataaggacgacagcaggggtcttgtgcttcctgggtacaagtacctcggacccttcaacggactcgacaagggagagccggtcaacgaggcagacgccgcggccctcgagcacgacaaagcctacgaccggcagctcgacagcggagacaacccgtacctcaagtacaaccacgccgacgcggagtttcaggagcgccttaaagaagatacgtcttttgggggcaacctcggacgagcagtcttccaggcgaaaaagagggttcttgaacctctgggcctggttgaggaacctgttaagacggctccgggaaaaaagaggccggtagagcactctcctgtggagccagactcctcctcgggaaccggaaaggcgggccagcagcctgcaagaaaaagattgaattttggtcagactggagacgcagactcagtacctgacccccagcctctcggacagccaccagcagccccctctggtctgggaactaatacgatggctacaggcagtggcgcaccaatggcagacaataacgagggcgccgacggagtgggtaattcctcgggaaattggcattgcgattccacatggatgggcgacagagtcatcaccaccagcacccgaacctgggccctgcccacctacaacaaccacctctacaaacaaatttccagccaatcaggagcctcgaacgacaatcactactttggctacagcaccccttgggggtattttgacttcaacagattccactgccacttttcaccacgtgactggcaaagactcatcaacaacaactggggattccgacccaagagactcaacttcaagctctttaacattcaagtcaaagaggtcacgcagaatgacggtacgacgacgattgccaataaccttaccagcacggttcaggtgtttactgactcggagtaccagctcccgtacgtcctcggctcggcgcatcaaggatgcctcccgccgttcccagcagacgtcttcatggtgccacagtatggatacctcaccctgaacaacgggagtcaggcagtaggacgctcttcattttactgcctggagtactttccttctcagatgctgcgtaccggaaacaactttaccttcagctacacttttgaggacgttcctttccacagcagctacgctcacagccagagtctggaccgtctcatgaatcctctcatcgaccagtacctgtattacttgagcagaacaaacactccaagtggaaccaccacgcagtcaaggcttcagttttctcaggccggagcgagtgacattcgggaccagtctaggaactggcttcctggaccctgttaccgccagcagcgagtatcaaagacatctgcggataacaacaacagtgaatactcgtggactggagctaccaagtaccacctcaatggcagagactctctggtgaatccgggcccggccatggcaagccacaaggacgatgaagaaaagttttttcctcagagcggggttctcatctttgggaagcaaggctcagagaaaacaaatgtggacattgaaaaggtcatgattacagacgaagaggaaatcaggacaaccaatcccgtggctacggagcagtatggttctgtatctaccaacctccagagaggcaacagacaagcagctaccgcagatgtcaacacacaaggcgttcttccaggcatggtctggcaggacagagatgtgtaccttcaggggcccatctgggcaaagattccacacacggacggacattttcacccctctcccctcatgggtggattcggacttaaacaccctcctccacagattctcatcaagaacaccccggtacctgcgaatccttcgaccaccttcagtgcggcaaagtttgcttccttcatcacacagtactccacgggacaggccagcgtggagatcgagtgggagctgcagaaggaaaacagcaaacgctggaatcccgaaattcagtacacttccaactacaacaagtctgttaatgtggactttactgtggacactaatggcgtgtattcagagcctcgccccattggcaccagatacctgactcgtaatctgtaa

SEQ ID NO: 4302 - DNA, 2208 bp, Artificial Sequence
  source: /note="Description of Artificial Sequence: Synthetic polynucleotide"
atggctgccgatggttatcttccagattggctcgaggacactctctctgaaggaataagacagtggtggaagctcaaacctggcccaccaccaccaaagcccgcagagcggcataaggacgacagcaggggtcttgtgcttcctgggtacaagtacctcggacccttcaacggactcgacaagggagagccggtcaacgaggcagacgccgcggccctcgagcacgacaaagcctacgaccggcagctcgacagcggagacaacccgtacctcaagtacaaccacgccgacgcggagtttcaggagcgccttaaagaagatacgtcttttgggggcaacctcggacgagcagtcttccaggcgaaaaagagggttcttgaacctctgggcctggttgaggaacctgttaagacggctccgggaaaaaagaggccggtagagcactctcctgtggagccagactcctcctcgggaaccggaaaggcgggccagcagcctgcaagaaaaagattgaattttggtcagactggagacgcagactcagtacctgacccccagcctctcggacagccaccagcagccccctctggtctgggaactaatacgatggctacaggcagtggcgcaccaatggcagacaataacgagggcgccgacggagtgggtaattcctcgggaaattggcattgcgattccacatggatgggcgacagagtcatcaccaccagcacccgaacctgggccctgcccacctacaacaaccacctctacaaacaaatttccagccaatcaggagcctcgaacgacaatcactactttggctacagcaccccttgggggtattttgacttcaacagattccactgccacttttcaccacgtgactggcaaagactcatcaacaacaactggggattccgacccaagagactcaacttcaagctctttaacattcaagtcaaagaggtcacgcagaatgacggtacgacgacgattgccaataaccttaccagcacggttcaggtgtttactgactcggagtaccagctcccgtacgtcctcggctcggcgcatcaaggatgcctcccgccgttcccagcagacgtcttcatggtgccacagtatggatacctcaccctgaacaacgggagtcaggcagtaggacgctcttcattttactgcctggagtactttccttctcagatgctgcgtaccggaaacaactttaccttcagctacacttttgaggacgttcctttccacagcagctacgctcacagccagagtctggaccgtctcatgaatcctctcatcgaccagtacctgtattacttgagcagaacaaacactccaagtggaaccaccacgcagtcaaggcttcagttttctcaggccggagcgagtgacattcgggaccagtctaggaactggcttcctggaccctgttaccgccagcagcgagtatcaaagacatctgcggataacaacaacagtgaatactcgtggactggagctaccaagtaccacctcaatggcagagactctctggtgaatccgggcccggccatggcaagccacaaggacgatgaagaaaagttttttcctcagagcggggttctcatctttgggaagcaaggctcagagaaaacaaatgtggacattgaaaaggtcatgattacagacgaagaggaaatcaggacaaccaatcccgtggctacggagcagtatggttctgtatctaccaacctccagagaggcaacagacaagcagctaccgcagatgtcaacacacaaggcgttcttccaggcatggtctggcaggacagagatgtgtaccttcaggggcccatctgggcaaagattccacacacggacggacattttcacccctctcccctcatgggtggattcggacttaaacaccctcctccacagattctcatcaagaacaccccggtacctgcgaatccttcgaccaccttcagtgcggcaaggtttgcttccttcatcacacagtactccacgggacaggtcagcgtggagatcgagtgggagctgcagaaggaaaacagcaaacgctggaatcccgaaattcagtacacttccaactacaacaagtctgttaatgtggactttactgtggacactaatggcgtgtattcagagcctcgccccattggcaccagatacctgactcgtaatctgtaa

SEQ ID NO: 4303 - DNA, 2208 bp, Artificial Sequence
  source: /note="Description of Artificial Sequence: Synthetic polynucleotide"
atggctgccgatggttatcttccagattggctcgaggacactctctctgaaggaataagacagtggtggaagctcaaacctggcccaccaccaccaaagcccgcagagcggcataaggacgacagcaggggtcttgtgcttcctgggtacaagtacctcggacccttcaacggactcgacaagggagagccggtcaacgaggcagacgccgcggccctcgagcacgacaaagcctacgaccggcagctcgacagcggagacaacccgtacctcaagtacaaccacgccgacgcggagtttcaggagcgccttaaagaagatacgtcttttgggggcaacctcggacgagcagtcttccaggcgaaaaagagggttcttgaacctctgggcctggttgaggaacctgttaagacggctccgggaaaaaagaggccggtagagcactctcctgtggagccagactcctcctcgggaaccggaaaggcgggccagcagcctgcaagaaaaagattgaattttggtcagactggaggcgcagactcagtacctgacccccagcctctcggacagccaccagcagccccctctggtctgggaactaatacgatggctacaggcagtggcgcaccaatggcagacaataacgagggcgccgacggagtgggtaattcctcgggaaattggcattgcgattccacatggatgggcgacagagtcatcaccaccagcacccgaacctgggccctgcccacctacaacaaccacctctacaaacaaatttccagccaatcaggagcctcgaacgacaatcactactttggctacagcaccccttgggggtattttgacttcaacagattccactgccacttttcaccacgtgactggcaaagactcatcaacaacaactggggattccgacccaagagactcaacttcaagctctttaacattcaagtcaaagaggtcacgcagaatgacggtacgacgacgattgccaataaccttaccagcacggttcaggtgtttactgactcggagtaccagctcccgtacgtcctcggctcggcgcatcaaggatgcctcccgccgttcccagcagacgtcttcatggtgccacagtatggatacctcaccctgaacaacgggagtcaggcagtaggacgctcttcattttactgcctggagtactttccttctcagatgctgcgtaccggaaacaactttaccttcagctacacttttgaggacgttcctttccacagcagctacgctcacagccagagtctggaccgtctcatgaatcctctcatcgaccagtacctgtattacttgagcagaacaaacactccaagtggaaccaccacgcagtcaaggcttcagttttctcaggccggagcgagtgacattcgggaccagtctaggaactggcttcctggaccctgttaccgccagcagcgagtatcaaagacatctgcggataacaacaacagtgaatactcgtggactggagctaccaagtaccacctcaatggcagagactctctggtgaatccgggcccggccatggcaagccacaaggacgatgaagaaaagttttttcctcagagcggggttctcatctttgggaagcaaggctcagagaaaacaaatgtggacattgaaaaggtcatgattacagacgaagaggaaatcaggacaaccaatcccgtggctacggagcagtatggttctgtatctaccaacctccagagaggcaacagacaagcagctaccgcagatgtcaacacacaaggcgttcttccaggcatggtctggcaggacagagatgtgtaccttcaggggcccatctgggcaaagattccacacacggacggacattttcacccctctcccctcatgggtggattcggacttaaacaccctcctccacagattctcatcaagaacaccccggtacctgcgaatccttcgaccaccttcagtgcggcaaagtttgcttccttcatcacacagtactccacgggacaggtcagcgtggagatcgagtgggagctgcagaaggaaaacagcaaacgctggaatcccgaaattcagtacacttccaactacaacaagtctgttaatgtggactttactgtggacactaatggcgtgtattcagagcctcgccccattggcaccagatacctgactcgtaatctgtaa

SEQ ID NO: 4304 - DNA, 2208 bp, Artificial Sequence
  source: /note="Description of Artificial Sequence: Synthetic polynucleotide"
atggctgccgatggttatcttccagattggctcgaggacactctctctgaaggaataagacagtggtggaagctcaaacctggcccaccaccaccaaagcccgcagagcggcataaggacgacagcaggggtcttgtgcttcctgggtacaagtacctcggacccttcaacggactcgacaagggagagccggtcaacgaggcagacgccgcggccctcgagcacgacaaagcctacgaccggcagctcgacagcggagacaacccgtacctcaagtacaaccacgccgacgcggagtttcaggagcgccttaaagaagatacgtcttttgggggcaacctcggacgagcagtcttccaggcgaaaaagagggttcttgaacctctgggcctggttgaggaacctgttaagacggctccgggaaaaaagaggccggtagagcactctcctgtggagccagactcctcctcgggaaccggaaaggcgggccagcagcctgcaagaaaaagattgaattttggtcagactggagacgcagactcagtacctgacccccagcctctcggacagccaccagcagccccctctggtctgggaactaatacgatggctacaggcagtggcgcaccaatggcagacaataacgagggcgccgacggagtgggtaattcctcgggaaattggcattgcgattccacatggatgggcgacagagtcatcaccaccagcacccgaacctgggccctgcccacctacaacaaccacctctacaaacaaatttccagccaatcaggagcctcgaacgacaatcactactttggctacagcaccccttgggggtattttgacttcaacagattccactgccacttttcaccacgtgactggcaaagactcatcaacaacaactggggattccgacccaagagactcaacttcaagctctttaacattcaagtcaaagaggtcacgcagaatgacggtacgacgacgattgccaataaccttaccagcacggttcaggtgtttactgactcggagtaccagctcccgtacgtcctcggctcggcgcatcaaggatgcctcccgccgttcccagcagacgtcttcatggtgccacagtatggatacctcaccctgaacaacgggagtcaggcagtaggacgctcttcattttactgcctggagtactttccttctcagatgctgcgtaccggaaacaactttaccttcagctacacttttgaggacgttcctttccacagcagctacgctcacagccagagtctggaccgtctcatgaatcctctcatcgaccagtacctgtattacttgagcagaacaaacactccaagtggaaccaccacgcagtcaaggcttcagttttctcaggccggagcgagtgacattcgggaccagtctaggaactggcttcctggaccctgttaccgccagcagcgagtatcaaagacatctgcggataacaacaacagtgaatactcgtggactggagctaccaagtaccacctcaatggcagagactctctggtgaatccgggcccggccatggcaagccacaaggacgatgaagaaaagttttttcctcagagcggggttctcatctttgggaagcaaggctcagagaaaacaaatgtggacattgaaaaggtcatgattacagacgaagaggaaatcaggacaaccaatcccgtggctacggagcagtatggttctgtatctaccaacctccagagaggcaacagacaagcagctaccgcagatgtcaacacacaaggcgttcttccaggcatggtctggcaggacagagatgtgtaccttcaggggcccatctgggcaaagattccacacacggacggacattttcacccctctcccctcatgggtggattcggacttaaacaccctcctccacagattctcatcaagaacaccccggtacctgcgaatccttcgaccaccttcagtgcggcaaagtttgcttccttcatcacacagtactccacgggacaggtcagcgtggagatcgagtgggagctgcagaaggaaaacagcaaacgctggaatcccgaaattcagtacacttccaactacaacaagtctgctaatgtggactttactgtggacactaatggcgtgtattcagagcctcgccccattggcaccagatacctgactcgtaatctgtaa

SEQ ID NO: 4305 - DNA, 2208 bp, Artificial Sequence
  source: /note="Description of Artificial Sequence: Synthetic polynucleotide"
atggctgccgatggttatcttccagattggctcgaggacactctctctgaaggaataagacagtggtggaagctcaaacctggcccaccaccaccaaagcccgcagagcggcataaggacgacagcaggggtcttgtgcttcctgggtacaagtacctcggacccttcaacggactcgacaagggagagccggtcaacgaggcagacgccgcggccctcgagcacgacaaagcctacgaccggcagctcgacagcggagacaacccgtacctcaagtacaaccacgccgacgcggagtttcaggagcgccttaaagaagatacgtcttttgggggcaacctcggacgagcagtcttccaggcgaaaaagagggttcttgaacctctgggcctggttgaggaacctgttaagacggctccgggaaaaaagaggccggtagagcactctcctgtggagccagactcctcctcgggaaccggaaaggcgggccagcagcctgcaagaaaaagattgaattttggtcagactggagacgcagactcagtacctgacccccagcctctcggacagccaccagcagccccctctggtctgggaactaatacgatggctacaggcagtggcgcaccaatggcagacaataacgagggcgccgacggagtgggtaattcctcgggaaattggcattgcgattccacatggatgggcgacagagtcatcaccaccagcacccgaacctgggccctgcccacctacaacaaccacctctacaaacaaatttccagccaatcaggagcctcgaacgacaatcactactttggctacagcaccccttgggggtattttgacttcaacagattccactgccacttttcaccacgtgactggcaaagactcatcaacaacaactggggattccgacccaagagactcaacttcaagctctttaacattcaagtcaaagaggtcacgcagaatgacggtacgacgacgattgccaataaccttaccagcacggttcaggtgtttactgactcggagtaccagctcccgtacgtcctcggctcggcgcatcaaggatgcctcccgccgttcccagcagacgtcttcatggtgccacagtatggatacctcaccctgaacaacgggagtcaggcagtaggacgctcttcattttactgcctggagtactttccttctcagatgctgcgtaccggaaacaactttaccttcagctacacttttgaggacgttcctttccacagcagctacgctcacagccagagtctggaccgtctcatgaatcctctcatcgaccagtacctgtattacttgagcagaacaaacactccaagtggaaccaccacgcagtcaaggcttcagttttctcaggccggagcgagtgacattcgggaccggtctaggaactggcttcctggaccctgttaccgccagcagcgagtatcaaagacatctgcggataacaacaacagtgaatactcgtggactggagctaccaagtaccacctcaatggcagagactctctggtgaatccgggcccggccatggcaagccacaaggacgatgaagaaaagttttttcctcagagcggggttctcatctttgggaagcaaggctcagagaaaacaaatgtggacattgaaaaggtcatgattacagacgaagaggaaatcaggacaaccaatcccgtggctacggagcagtatggttctgtatctaccaacctccagagaggcaacagacaagcagctaccgcagatgtcaacacacaaggcgttcttccaggcatggtctggcaggacagagatgtgtaccttcaggggcccatctgggcaaagattccacacacggacggacattttcacccctctcccctcatgggtggattcggacttaaacaccctcctccacagattctcatcaagaacaccccggtacctgcgaatccttcgaccaccttcagtgcggcaaagtttgcttccttcatcacacagtactccacgggacaggtcagcgtggagatcgagtgggagctgcagaaggaaaacagcaaacgctggaatcccgaaattcagtacacttccaactacaacaagtctgttaatgtggactttactgtggacactaatggcgtgtattcagagcctcgccccattggcaccagatacctgactcgtaatctgtaa

SEQ ID NO: 4306 - DNA, 2208 bp, Artificial Sequence
  source: /note="Description of Artificial Sequence: Synthetic polynucleotide"
atggctgccgatggttatcttccagattggctcgaggacactctctctgaaggaataagacagtggtggaagctcaaacctggcccaccaccaccaaagcccgcagagcggcataaggacgacagcaggggtcttgtgcttcctgggtacaagtacctcggacccttcaacggactcgacaagggagagccggtcaacgaggcagacgccgcggccctcgagcacgacaaagcctacgaccggcagctcgacagcggagacaacccgtacctcaagtacaaccacgccgacgcggagtttcaggagcgccttaaagaagatacgtcttttgggggcaacctcggacgagcagtcttccaggcgaaaaagagggttcttgaacctctgggcctggttgaggaacctgttaagacggctccgggaaaaaagaggccggtagagcactctcctgtggagccagactcctcctcgggaaccggaaaggcgggccagcagcctgcaagaaaaagattgaattttggtcagactggagacgcagactcagtacctgacccccagcctctcggacagccaccagcagccccctctggtctgggaactaatacgatggctacaggcagtggcgcaccaatggcagacaataacgagggcgccgacggagtgggtaattcctcgggaaattggcattgcgattccacatggatgggcgacagagtcatcaccaccagcacccgaacctgggccctgcccacctacaacaaccacctctacaaacaaatttccagccaatcaggagcctcgaacgacaatcactactttggctacagcaccccttgggggtattttgacttcaacagattccactgccacttttcaccacgtgactggcaaagactcatcaacaacaactggggattccgacccaagagactcaacttcaagctctttaacattcaagtcaaagaggtcacgcagaatgacggtacgacgacgattgccaataaccttaccagcacggttcaggtgtttactgactcggagtaccagctcccgtacgtcctcggctcggcgcatcaaggatgcctcccgccgttcccagcagacgtcttcatggtgccacagtatggatacctcaccctgaacaacgggagtcaggcagtaggacgctcttcattttactgcctggagtactttccttctcagatgctgcgtaccggaaacaactttaccttcagctacacttttgaggacgttcctttccacagcagctacgctcacagccagagtctggaccgtctcatgaatcctctcatcgaccagtacctgtattacttgagcagaacaaacactccaagtggaaccaccacgcagtcaaggcttcagttttctcaggccggagcgagtgacattcgggaccagtctaggaactggcttcctggaccctgttaccgccagcagcgagtatcaaaggcatctgcggataacaacaacagtgaatactcgtggactggagctaccaagtaccacctcaatggcagagactctctggtgaatccgggcccggccatggcaagccacaaggacgatgaagaaaagttttttcctcagagcggggttctcatctttgggaagcaaggctcagagaaaacaaatgtggacattgaaaaggtcatgattacagacgaagaggaaatcaggacaaccaatcccgtggctacggagcagtatggttctgtatctaccaacctccagagaggcaacagacaagcagctaccgcagatgtcaacacacaaggcgttcttccaggcatggtctggcaggacagagatgtgtaccttcaggggcccatctgggcaaagattccacacacggacggacattttcacccctctcccctcatgggtggattcggacttaaacaccctcctccacagattctcatcaagaacaccccggtacctgcgaatccttcgaccaccttcagtgcggcaaagtttgcttccttcatcacacagtactccacgggacaggtcagcgtggagatcgagtgggagctgcagaaggaaaacagcaaacgctggaatcccgaaattcagtacacttccaactacaacaagtctgttaatgtggactttactgtggacactaatggcgtgtattcagagcctcgccccattggcaccagatacctgactcgtaatctgtaa

SEQ ID NO: 4307 - DNA, 2208 bp, Artificial Sequence
  source: /note="Description of Artificial Sequence: Synthetic polynucleotide"
atggctgccgatggttatcttccagattggctcgaggacactctctctgaaggaataagacagtggtggaagctcaaacctggcccaccaccaccaaagcccgcagagcggcataaggacgacagcaggggtcttgtgcttcctgggtacaagtacctcggacccttcaacggactcgacaagggagagccggtcaacgaggcagacgccgcggccctcgagcacgacaaagcctacgaccggcagctcgacagcggagacaacccgtacctcaagtacaaccacgccgacgcggagtttcaggagcgccttaaagaagatacgtcttttgggggcaacctcggacgagcagtcttccaggcgaaaaagagggttcttgaacctctgggcctggttgaggaacctgttaagacggctccgggaaaaaagaggccggtagagcactctcctgtggagccagactcctcctcgggaaccggaaaggcgggccagcagcctgcaagaaaaagattgaattttggtcagactggagacgcagactcagtacctgacccccagcctctcggacagccaccagcagccccctctggtctgggaactaatacgatggctacaggcagtggcgcaccaatggcagacaataacgagggcgccgacggagtgggtaattcctcgggaaattggcattgcgattccacatggatgggcgacagagtcatcaccaccagcacccgaacctgggccctgcccacctacaacaaccacctctacaaacaaatttccagccaatcaggagcctcgaacgacaatcactactttggctacagcaccccttgggggtattttgacttcaacagattccactgccacttttcaccacgtgactggcaaagactcatcaacaacaactggggattccgacccaagagactcaacttcaagctctttaacattcaagtcaaagaggtcacgcagaatgacggtacgacgacgattgccaataaccttaccagcacggttcaggtgtttactgactcggagtaccagctcccgtacgtcctcggctcggcgcatcaaggatgcctcccgccgttcccagcagacgtcttcatggtgccacagtatggatacctcaccctgaacaacgggagtcaggcagtaggacgctcttcattttactgcctggagtactttccttctcagatgctgcgtaccggaaacaactttaccttcagctacacttttgaggacgttcctttccacagcagctacgctcacagccagagtctggaccgtctcatgaatcctctcatcgaccagtacctgtattacttgagcagaacaaacactccaagtggaaccaccacgcagtcaaggcttcagttttctcaggccggagcgagtgacattcgggaccagtctaggaactggcttcctggaccctgttaccgccagcagcgagtatcaaagacatctgcggataacaacaacagtgaatactcgtggactggagctaccaagcaccacctcaatggcagagactctctggtgaatccgggcccggccatggcaagccacaaggacgatgaagaaaagttttttcctcagagcggggttctcatctttgggaagcaaggctcagagaaaacaaatgtggacattgaaaaggtcatgattacagacgaagaggaaatcaggacaaccaatcccgtggctacggagcagtatggttctgtatctaccaacctccagagaggcaacagacaagcagctaccgcagatgtcaacacacaaggcgttcttccaggcatggtctggcaggacagagatgtgtaccttcaggggcccatctgggcaaagattccacacacggacggacattttcacccctctcccctcatgggtggattcggacttaaacaccctcctccacagattctcatcaagaacaccccggtacctgcgaatccttcgaccaccttcagtgcggcaaagtttgcttccttcatcacacagtactccacgggacaggtcagcgtggagatcgagtgggagctgcagaaggaaaacagcaaacgctggaatcccgaaattcagtacacttccaactacaacaagtctgttaatgtggactttactgtggacactaatggcgtgtattcagagcctcgccccattggcaccagatacctgactcgtaatctgtaa

SEQ ID NO: 4308 - DNA, 2208 bp, Artificial Sequence
  source: /note="Description of Artificial Sequence: Synthetic polynucleotide"
atggctgccgatggttatcttccagattggctcgaggacactctctctgaaggaataagacagtggtggaagctcaaacctggcccaccaccaccaaagcccgcagagcggcataaggacgacagcaggggtcttgtgcttcctgggtacaagtacctcggacccttcaacggactcgacaagggagagccggtcaacgaggcagacgccgcggccctcgagcacgacaaagcctacgaccggcagctcgacagcggagacaacccgtacctcaagtacaaccacgccgacgcggagtttcaggagcgccttaaagaagatacgtcttttgggggcaacctcggacgagcagtcttccaggcgaaaaagagggttcttgaacctctgggcctggttgaggaacctgttaagacggctccgggaaaaaagaggccggtagagcactctcctgtggagccagactcctcctcgggaaccggaaaggcgggccagcagcctgcaagaaaaagattgaattttggtcagactggagacgcagactcagtacctgacccccagcctctcggacagccaccagcagccccctctggtctgggaactaatacgatggctacaggcagtggcgcaccaatggcagacaataacgagggcgccgacggagtgggtaattcctcgggaaattggcattgcgattccacatggatgggcgacagagtcatcaccaccagcacccgaacctgggccctgcccacctacaacaaccacctctacaaacaaatttccagccaatcaggagcctcgaacgacaatcactactttggctacagcaccccttgggggtattttgacttcaacagattccactgccacttttcaccacgtgactggcaaagactcatcaacaacaactggggattccgacccaagagactcaacttcaagctctttaacattcaagtcaaagaggtcacgcagaatgacggtacgacgacgattgccaataaccttaccggcacggttcaggtgtttactgactcggagtaccagctcccgtacgtcctcggctcggcgcatcaaggatgcctcccgccgttcccagcagacgtcttcatggtgccacagtatggatacctcaccctgaacaacgggagtcaggcagtaggacgctcttcattttactgcctggagtactttccttctcagatgctgcgtaccggaaacaactttaccttcagctacacttttgaggacgttcctttccacagcagctacgctcacagccagagtctggaccgtctcatgaatcctctcatcgaccagtacctgtattacttgagcagaacaaacactccaagtggaaccaccacgcagtcaaggcttcagttttctcaggccggagcgagtgacattcgggaccagtctaggaactggcttcctggaccctgttaccgccagcagcgagtatcaaagacatctgcggataacaacaacagtgaatactcgtggactggagctaccaagtaccacctcaatggcagagactctctggtgaatccgggcccggccatggcaagccacaaggacgatgaagaaaagttttttcctcagagcggggttctcatctttgggaagcaaggctcagagaaaacaaatgtggacattgaaaaggtcatgattacagacgaagaggaaatcaggacaaccaatcccgtggctacggagcagtatggttctgtatctaccaacctccagagaggcaacagacaagcagctaccgcagatgtcaacacacaaggcgttcttccaggcatggtctggcaggacagagatgtgtaccttcaggggcccatctgggcaaagattccacacacggacggacattttcacccctctcccctcatgggtggattcggacttaaacaccctcctccacagattctcatcaagaacaccccggtacctgcgaatccttcgaccaccttcagtgcggcaaagtttgcttccttcatcacacagtactccacgggacaggtcagcgtggagatcgagtgggagctgcagaaggaaaacagcaaacgctggaatcccgaaattcagtacacttccaactacaacaagtctgttaatgtggactttactgtggacactaatggcgtgtattcagagcctcgccccattggcaccagatacctgactcgtaatctgtaa

SEQ ID NO: 4309 - DNA, 2208 bp, Artificial Sequence
  source: /note="Description of Artificial Sequence: Synthetic polynucleotide"
atggctgccgatggttatcttccagattggctcgaggacactctctctgaaggaataagacagtggtggaagctcaaacctggcccaccaccaccaaagcccgcagagcggcataaggacgacagcaggggtcttgtgcttcctgggtacaagtacctcggacccttcaacggactcgacaagggagagccggtcaacgaggcagacgccgcggccctcgagcacgacaaagcctacgaccggcagctcgacagcggagacaacccgtacctcaagtacaaccacgccgacgcggagtttcaggagcgccttaaagaagatacgtcttttgggggcaacctcggacgagcagtcttccgggcgaaaaagagggttcttgaacctctgggcctggttgaggaacctgttaagacggctccgggaaaaaagaggccggtagagcactctcctgtggagccagactcctcctcgggaaccggaaaggcgggccagcagcctgcaagaaaaagattgaattttggtcagactggagacgcagactcagtacctgacccccagcctctcggacagccaccagcagccccctctggtctgggaactaatacgatggctacaggcagtggcgcaccaatggcagacaataacgagggcgccgacggagtgggtaattcctcgggaaattggcattgcgattccacatggatgggcgacagagtcatcaccaccagcacccgaacctgggccctgcccacctacaacaaccacctctacaaacaaatttccagccaatcaggagcctcgaacgacaatcactactttggctacagcaccccttgggggtattttgacttcaacagattccactgccacttttcaccacgtgactggcaaagactcatcaacaacaactggggattccgacccaagagactcaacttcaagctctttaacattcaagtcaaagaggtcacgcagaatgacggtacgacgacgattgccaataaccttaccagcacggttcaggtgtttactgactcggagtaccagctcccgtacgtcctcggctcggcgcatcaaggatgcctcccgccgttcccagcagacgtcttcatggtgccacagtatggatacctcaccctgaacaacgggagtcaggcagtaggacgctcttcattttactgcctggagtactttccttctcagatgctgcgtaccggaaacaactttaccttcagctacacttttgaggacgttcctttccacagcagctacgctcacagccagagtctggaccgtctcatgaatcctctcatcgaccagtacctgtattacttgagcagaacaaacactccaagtggaaccaccacgcagtcaaggcttcagttttctcaggccggagcgagtgacattcgggaccagtctaggaactggcttcctggaccctgttaccgccagcagcgagtatcaaagacatctgcggataacaacaacagtgaatactcgtggactggagctaccaagtaccacctcaatggcagagactctctggtgaatccgggcccggccatggcaagccacaaggacgatgaagaaaagttttttcctcagagcggggttctcatctttgggaagcaaggctcagagaaaacaaatgtggacattgaaaaggtcatgattacagacgaagaggaaatcaggacaaccaatcccgtggctacggagcagtatggttctgtatctaccaacctccagagaggcaacagacaagcagctaccgcagatgtcaacacacaaggcgttcttccaggcatggtctggcaggacagagatgtgtaccttcaggggcccatctgggcaaagattccacacacggacggacattttcacccctctcccctcatgggtggattcggacttaaacaccctcctccacagattctcatcaagaacaccccggtacctgcgaatccttcgaccaccttcagtgcggcaaagtttgcttccttcatcacacagtactccacgggacaggtcagcgtggagatcgagtgggagctgcagaaggaaaacagcaaacgctggaatcccgaaattcagtacacttccaactacaacaagtctgttaatgtggactttactgtggacactaatggcgtgtattcagagcctcgccccattggcaccagatacctgactcgtaatctgtaa

SEQ ID NO: 4310 - DNA, 2208 bp, Artificial Sequence
  source: /note="Description of Artificial Sequence: Synthetic polynucleotide"
atggctgccgatggttatcttccagattggctcgaggacactctctctgaaggaataagacagtggtggaagctcaaacctggcccaccaccaccaaagcccgcagagcggcataaggacgacagcaggggtcttgtgcttcctgggtacaagtacctcggacccttcaacggactcgacaagggagagccggtcaacgaggcagacgccgcggccctcgagcacgacaaagcctacgaccggcagctcgacagcggagacaacccgtacctcaagtacaaccacgccgacgcggagtttcaggagcgccttaaagaagatacgtcttttgggggcaacctcggacgagcagtcttccaggcgaaaaagagggttcttgaacctctgggcctggttgaggaacctgttaagacggctccgggaaaaaagaggccggtagagcactctcctgtggagccagactcctcctcgggaaccggaaaggcgggccagcagcctgcaagaaaaagattgaattttggtcagactggagacgcagactcagtacctgacccccagcctctcggacagccaccagcagccccctctggtctgggaactaatacgatggctacaggcagtggcgcaccaatggcagacaataacgagggcgccgacggagtgggtaattcctcgggaaattggcattgcgattccacatggatgggcgacagagtcatcaccaccagcacccgaacctgggccctgcccacctacaacaaccacctctacaaacaaatttccagccaatcaggagcctcgaacgacaatcactactttggctacagcaccccttgggggtattttgacttcaacagattccactgccacttttcaccacgtgactggcaaagactcatcaacaacaactggggattccgacccaagagactcaacttcaagctctttaacattcaagtcaaagaggtcacgcagaatgacggtacgacgacgattgccaataaccttaccagcacggttcaggtgtttactgactcggagtaccagctcccgtacgtcctcggctcggcgcatcaaggatgcctcccgccgttcccagcagacgtcttcatggtgccacagtatggatacctcaccctgaacaacgggagtcaggcagtaggacgctcttcattttactgcctggagtactttccttctcagatgctgcgtaccggaaacaactttaccttcagctacacttttgaggacgttcctttccacagcagctacgctcacagccagagtctggaccgtctcatgaatcctctcatcgaccagtacctgtattacttgagcagaacaaacactccaagtggaaccaccacgcagtcaaggcttcagttttctcaggccggagcgagtgacattcgggaccagtctaggaactggcttcctggaccctgttaccgccagcagcgagtatcaaagacatctgcggataacaacaacagtgaatactcgtggactggagctaccaagtaccacctcaatggcagagactctctggtgaatccgggcccggccatggcaagccacaaggacgatgaagaaaagttttttcctcagagcggggttctcatctttgggaagcaaggctcagagaaaacaaatgtggacattgaaaaggtcatgattacagacgaagaggaaatcaggacaaccaatcccgtggctacggagcagtatggttctgtatctaccaacctccagagaggcaacagacaagcagctaccgcagatgtcaacacacaaggcgttcttccaggcacggtctggcaggacagagatgtgtaccttcaggggcccatctgggcaaagattccacacacggacggacattttcacccctctcccctcatgggtggattcggacttaaacaccctcctccacagattctcatcaagaacaccccggtacctgcgaatccttcgaccaccttcagtgcggcaaagtttgcttccttcatcacacagtactccacgggacaggccagcgtggagatcgagtgggagctgcagaaggaaaacagcaaacgctggaatcccgaaattcagtacacttccaactacaacaagtctgttaatgtggactttactgtggacactaatggcgtgtattcagagcctcgccccattggcaccagatacctgactcgtaatctgtaa

SEQ ID NO: 4311 - DNA, 2208 bp, Artificial Sequence
  source: /note="Description of Artificial Sequence: Synthetic polynucleotide"
atggctgccgatggttatcttccagattggctcgaggacactctctctgaaggaataagacagtggtggaagctcaaacctggcccaccaccgccaaagcccgcagagcggcacaaggacgccagtaggggtcttgtgcttcctgggtacaagtacctcggacccttcaacggactcgacaaaggagagccggtcaacgaggcagacgccgcggccctcgagcacgacaaggcctacgaccggcagctcgacagcggagacaacccgtacctcaagtacaaccacgccgacgcggagtttcaggagcgtcttaaagaagatacgtcttttgggggcaacctcggacgagcagtattccaggcgaaaaagagggttcttgaacctctgggcctggttgaggagcctgttaagacggctccgggaaaaaagaggccggtagagcactctcctgtggagccagactcctcctcgggaaccggaaaagcgggccagcagcctgcaagaaaaagattgaattttggtcagactggagacgcagactccgtacctgacccccagcctctcggacagccaccagcagcccccacaagtttgggatctactacaatggctacaggcagtggcgcaccaatggcagacaataacgagggtgccgatggagtgggtaattcctcaggaaattggcattgcgattcccaatggctgggcgacagagtcatcaccaccagcacccgaacctgggccctgcccacctacaacaaccacctctacaagcaaatctccagccaatcaggagcatcgaacgacaaccactactttggctacagcaccccttgggggtattttgacttcaacagattccactgtcacttctccccacgtgactggcaaagactcatcaacaacaactggggattccgacccaagagactcaacttcaagctctttaacattcaagtcaaagaggtcacgcagaatgacggtacgacgacgattgccaataaccttaccagcacggttcaggtgtttactgactcggagtaccagctcccgtacgtcctcggctcggcgcatcaaggatgcctcccgccgttcccagcagacgtcttcatggtcccacagtatggatacctcaccctgaacaacgggagtcaggcggtaggacgctcttccttttactgcctggagtactttccttctcagatgctgcgtaccggaaacaactttaccttcagctacacttttgaggacgttcctttccacagcagctacgctcacagccagagtctggaccgtctcatgaatcctctcatcgaccagtacctgtattacttgagcagaacaaacactccaagtggaaccaccacgcagtcaaggcttcagttttctcaggccggagcgagtgacattcgggaccagtctaggaactggcttcctggaccctgttaccgccagcagcgagtatcaaagacatctgcggataacaacaacagtgaatactcgtggactggagctaccaagtaccacctcaatggcagagactctctggtgaatccgggcccggccatggcaagccacaaggacgatgaagaaaagttttttcctcagagcggggttctcatctttgggaagcaaggctcagagaaaacaaatgtggacattgaaaaggtcatgattacagacgaagaggaaatcaggacaaccaatcccgtggctacggagcagtatggttctgtatctaccaacctccagagaggcaacagacaagcagctaccgcagatgtcaacacacaaggcgttcttccaggcatggtctggcaggacagagatgtgtaccttcaggggcccatctgggcaaagattccacacacggacggacattttcacccctctcccctcatgggtggattcggacttaaacaccctcctccacagattctcatcaagaacaccccggtacctgcgaatccttcgaccaccttcagtgcggcaaagtttgcttccttcatcacacagtactccacgggacaggtcagcgtggagatcgagtgggagctgcagaaggaaaacagcaaacgctggaatcccgaaattcagtacacttccaactacaacaagtctgttaatgtggactttactgtggacactaatggcgtgtattcagagcctcgccccattggcaccagatacctgactcgtaatctgtaa

SEQ ID NO: 4312 - DNA, 2208 bp, Artificial Sequence
  source: /note="Description of Artificial Sequence: Synthetic polynucleotide"
atggctgccgatggttatcttccagattggctcgaggacactctctctgaaggaataagacagtggtggaagctcaaacctggcccaccaccaccaaagcccgcagagcggcataaggacgacagcaggggtcttgtgcttcctgggtacaagtacctcggacccttcaacggactcgacaagggagagccggtcaacgaggcagacgccgcggccctcgagcacgacaaagcctacgaccggcagctcgacagcggagacaacccgtacctcaagtacaaccacgccgacgcggagtttcaggagcgccttaaagaagatacgtcttttgggggcaacctcggacgagcagtcttccaggcgaaaaagagggttcttgaacctctgggcctggttgaggaacctgttaagacggctccgggaaaaaagaggccggtagagcactctcctgtggagccagactcctcctcgggaaccggaaaggcgggccagcagcctgcaagaaaaagattgaattttggtcagactggagacgcagactcagtacctgacccccagcctctcggacagccaccagcagccccctctggtctgggaactaatacgatggctacaggcagtggcgcaccaatggcagacaataacgagggcgccgacggagtgggtaattcctcgggaaattggcattgcgattccacatggatgggcgacagagtcatcaccaccagcacccgaacctgggccctgcccacctacaacaaccacctctacaaacaaatttccagccaatcaggagccccgaacgacaatcactactttggctacagcaccccttgggggtattttgacttcaacagattccactgccacttttcaccacgtgactggcaaagactcatcaacaacaactggggattccgacccaagagactcaacttcaagctctttaacattcaagtcaaagaggtcacgcagaatgacggtacgacgacgattgccaataaccttaccagcacggttcaggtgtttactgactcggagtaccagctcccgtacgtcctcggctcggcgcatcaaggatgcctcccgccgttcccagcagacgtcttcatggtgccacagtatggatacctcaccctgaacaacgggagtcaggcagtaggacgctcttcattttactgcctggagtactttccttctcagatgctgcgtaccggaaacaactttaccttcagctacacttttgaggacgttcctttccacagcagctacgctcacagccagagtctggaccgtctcatgaatcctctcatcgaccagtacctgtattacttgagcagaacaaacactccaagtggaaccaccacgcagtcaaggcttcagttttctcaggccggagcgagtgacattcgggaccagtctaggaactggcttcctggaccctgttaccgccagcagcgagtatcaaagacatctgcggataacaacaacagtgaatactcgtggactggagctaccaagtaccacctcaatggcagagactctctggtgaatccgggcccggccatggcaagccacaaggacgatgaagaaaagttttttcctcagagcggggttctcatctttgggaagcaaggctcagagaaaacaaatgtggacattgaaaaggtcatgattacagacgaagaggaaatcaggacaaccaatcccgtggctacggagcagtatggttctgtatctaccaacctccagagaggcaacagacaagcagctaccgcagatgtcaacacacaaggcgttcttccaggcatggtctggcaggacagagatgtgtaccttcaggggcccatctgggcaaagattccacacacggacggacattttcacccctctcccctcatgggtggattcggacttaaacaccctcctccacagattctcatcaagaacaccccggtacctgcgaatccttcgaccaccttcagtgcggcaaagtttgcttccttcatcacacagtactccacgggacaggccagcgtggagatcgagtgggagctgcagaaggaaaacagcaaacgctggaatcccgaaattcagtacacttccaactacaacaagtctgttaatgtggactttactgtggacactaatggcgtgtattcagagcctcgccccattggcaccagatacctgactcgtaatctgtaa

SEQ ID NO: 4313 - DNA, 2208 bp, Artificial Sequence
  source: /note="Description of Artificial Sequence: Synthetic polynucleotide"
atggctgccgatggttatcttccagattggctcgaggacactctctctgaaggaataagacagtggtggaagctcaaacctggcccaccaccaccaaagcccgcagagcggcataaggacgacagcaggggtcttgtgcttcctgggtacaagtacctcggacccttcaacggactcgacaaaggagagccggtcaacgaggcagacgccgcggccctcgagcacgacaaggcctacgaccggcagctcgacagcggagacaacccgtacctcaagtacaaccacgccgacgcggagtttcaggagcgtcttaaagaagatacgtcttttgggggcaacctcggacgagcagtattccaggcgaaaaagagggttcttgaacctctgggcctggttgaggagcctgttaagacggctccgggaaaaaagaggccggtagagcactctcctgtggagccagactcctcctcgggaaccggaaaagcgggccagcagcctgcaagaaaaagattgaattttggtcagactggagacgcagactccgtacctgacccccagcctctcggacagccaccagcagcccccacaagtttgggatctactacaatggctacaggcagtggcgcaccaatggcagacaataacgagggtgccgatggagtgggtaattcctcaggaaattggcattgcgattcccaatggctgggcgacagagtcatcaccaccagcacccgaacctgggccctgcccacctacaacaaccacctctacaaacaaatttccagccaatcaggagcctcgaacgacaatcactactttggctacagcaccccttgggggtattttgacttcaacagattccactgccacttttcaccacgtgactggcaaagactcatcaacaacaactggggattccgacccaagagactcaacttcaagctctttaacattcaagtcaaagaggtcacgcagaatgacggtacgacgacgattgccaataaccttaccagcacggttcaggtgtttactgactcggagtaccagctcccgtacgtcctcggctcggcgcatcaaggatgcctcccgccgttcccagcagacgtcttcatggtgccacagtatggatacctcaccctgaacaacgggagtcaggcagtaggacgctcttcattttactgcctggagtactttccttctcagatgctgcgtaccggaaacaactttaccttcagctacacttttgaggacgttcctttccacagcagctacgctcacagccagagtctggaccgtctcatgaatcctctcatcgaccagtacctgtattacttgagcagaacaaacactccaagtggaaccaccacgcagtcaaggcttcagttttctcaggccggagcgagtgacattcgggaccagtctaggaactggcttcctggaccctgttaccgccagcagcgagtatcaaagacatctgcggataacaacaacagtgaatactcgtggactggagctaccaagtaccacctcaatggcagagactctctggtgaatccgggcccggccatggcaagccacaaggacgatgaagaaaagttttttcctcagagcggggttctcatctttgggaagcaaggctcagagaaaacaaatgtggacattgaaaaggtcatgattacagacgaagaggaaatcaggacaaccaatcccgtggctacggagcagtatggttctgtatctaccaacctccagagaggcaacagacaagcagctaccgcagatgtcaacacacaaggcgttcttccaggcatggtctggcaggacagagatgtgtaccttcaggggcccatctgggcaaagattccacacacggacggacattttcacccctctcccctcatgggtggattcggacttaaacaccctcctccacagattctcatcaagaacaccccggtacctgcgaatccttcgaccaccttcagtgcggcaaagtttgcttccttcatcacacagtactccacgggacaggtcagcgtggagatcgagtgggagctgcagaaggaaaacagcaaacgctggaatcccgaaattcagtacacttccaactacaacaagtctgttaatgtggactttactgtggacactaatggcgtgtattcagagcctcgccccattggcaccagatacctgactcgtaatctgtaa

SEQ ID NO: 4314 - DNA, 2208 bp, Artificial Sequence
  source: /note="Description of Artificial Sequence: Synthetic polynucleotide"
atggctgccgatggttatcttccagattggctcgaggacattctctctgaaggaataagacagtggtggaagctcaaacctggcccaccaccgccaaagcccgcagagcggcacaaggacgccagtaggggtcttgtgcttcctgggtacaagtacctcggacccttcaacggactcgacaaaggagagccggtcaacgaggcagacgccgcggccctcgagcacgacaaggcctacgaccggcagctcgacagcggagacaacccgtacctcaagtacaaccacgccgacgcggagtttcaggagcgtcttaaagaagatacgtcttttgggggcaacctcggacgagcagtattccaggcgaaaaagagggttcttgaacctctgggcctggttgaggagcctgttaagacggctccgggaaaaaagaggccggtagagcactctcctgtggagccagactcctcctcgggaaccggaaaagcgggccagcagcctgcaagaaaaagattgaattttggtcagactggagacgcagactccgtacctgacccccagcctctcggacagccaccagcagcccccacaagtttgggatctactacaatggctacaggcagtggcgcaccaatggcagacaataacgagggtgccgatggagtgggtaattcctcaggaaattggcattgcgattcccaatggctgggcgacagagtcatcaccaccagcacccgaacctgggccctgcccacctacaacaaccacctctacaagcaaatctccagccaatcaggagcatcgaacgacaaccactactttggctacagcaccccttgggggtattttgacttcaacagattccactgtcacttctccccacgtgactggcaaagactcatcaacaacaactggggattccgacccaagagactcaacttcaagctctttaacattcaagtcaaagaggtcacgcagaatgacggtacgacgacgattgccaataaccttaccagcacggttcaggtgtttactgactcggagtaccagctcccgtacgtcctcggctcggcgcatcaaggatgcctcccgccgttcccagcagacgtcttcatggtgccacagtatggatacctcaccctgaacaacgggagtcaggcagtaggacgctcttcattttactgcctggagtactttccttctcagatgctgcgtaccggaaacaactttaccttcagctacacttttgaggacgttcctttccacagcagctacgctcacagccagagtctggaccgtctcatgaatcctctcatcgaccagtacctgtattacttgagcagaacaaacactccaagtggaaccaccacgcagtcaaggcttcagttttctcaggccggagcgagtgacattcgggaccagtctaggaactggcttcctggaccctgttaccgccagcagcgagtatcaaagacatctgcggataacaacaacagtgaatactcgtggactggagctaccaagtaccacctcaatggcagagactctctggtgaatccgggcccggccatggcaagccacaaggacgatgaagaaaagttttttcctcagagcggggttctcatctttgggaagcaaggctcagagaaaacaaatgtggacattgaaaaggtcatgattacagacgaagaggaaatcaggacaaccaatcccgtggctacggagcagtatggttctgtatctaccaacctccagagaggcaacagacaagcagctaccgcagatgtcaacacacaaggcgttcttccaggcatggtctggcaggacagagatgtgtaccttcaggggcccatctgggcaaagattccacacacggacggacattttcacccctctcccctcatgggtggattcggacttaaacaccctcctccacagattctcatcaagaacaccccggtacctgcgaatccttcgaccaccttcagtgcggcaaagtttgcttccttcatcacacagtactccacgggacaggtcagcgtggagatcgagtgggagctgcagaaggaaaacagcaaacgctggaatcccgaaattcagtacacttccaactacaacaagtctgttaatgtggactttactgtggacactaatggcgtgtattcagagcctcgccccattggcaccagatacctgactcgtaatctgtaa

SEQ ID NO: 4315 - DNA, 2208 bp, Artificial Sequence
  source: /note="Description of Artificial Sequence: Synthetic polynucleotide"
atggctgccgatggttatcttccagattggctcgaggacactctctctgaaggaataagacagtggtggaagctcaaacctggcccaccaccgccaaagcccgcagagcggcacaaggacgccagtaggggtcttgtgcttcctgggtacaagtacctcggacccttcaacggactcgacaaaggagagccggtcaacgaggcagacgccgcggccctcgagcacgacaaggcctacgaccggcagctcgacagcggagacaacccgtacctcaagtacaaccacgccgacgcggagtttcaggagcgtcttaaagaagatacgtcttttgggggcaacctcggacgagcagtattccaggcgaaaaagagggttcttgaacctctgggcctggttgaggagcctgttaagacggctccgggaaaaaagaggccggtagagcactctcctgtggagccagactcctcctcgggaaccggaaaagcgggccagcagcctgcaagaaaaagattgaattttggtcagactggagacgcagactcagtacctgacccccagcctctcggacagccaccagcagccccctctggtctgggaactaatacgatggctacaggcagtggcgcaccaatggcagacaataacgagggcgccgacggagtgggtaattcctcgggaaattggcattgcgattccacatggatgggcgacagagtcatcaccaccagcacccgaacctgggccctgcccacctacaacaaccacctctacaaacaaatttccagccaatcaggagcctcgaacgacaatcactactttggctacagcaccccttgggggtattttgacttcaacagattccactgccacttttcaccacgtgactggcaaagactcatcaacaacaactggggattccgacccaagagactcaacttcaagctctttaacattcaagtcaaagaggtcacgcagaatgacggtacgacgacgattgccaataaccttaccagcacggttcaggtgtttactgactcggagtaccagctcccgtacgtcctcggctcggcgcatcaaggatgcctcccgccgttcccagcagacgtcttcatggtgccacagtatggatacctcaccctgaacaacgggagtcaggcagtaggacgctcttcattttactgcctggagtactttccttctcagatgctgcgtaccggaaacaactttaccttcagctacacttttgaggacgttcctttccacagcagctacgctcacagccagagtctggaccgtctcatgaatcctctcatcgaccagtacctgtattacttgagcagaacaaacactccaagtggaaccaccacgcagtcaaggcttcagttttctcaggccggagcgagtgacattcgggaccagtctaggaactggcttcctggaccctgttaccgccagcagcgagtatcaaagacatctgcggataacaacaacagtgaatactcgtggactggagctaccaagtaccacctcaatggcagagactctctggtgaatccgggcccggccatggcaagccacaaggacgatgaagaaaagttttttcctcagagcggggttctcatctttgggaagcaaggctcagagaaaacaaatgtggacattgaaaaggtcatgattacagacgaagaggaaatcaggacaaccaatcccgtggctacggagcagtatggttctgtatctaccaacctccagagaggcaacagacaagcagctaccgcagatgtcaacacacaaggcgttcttccaggcatggtctggcaggacagagatgtgtaccttcaggggcccatctgggcaaagattccacacacggacggacattttcacccctctcccctcatgggtggattcggacttaaacaccctcctccacagattctcatcaagaacaccccggtacctgcgaatccttcgaccaccttcagtgcggcaaagtttgcttccttcatcacacagtactccacgggacaggccagcgtggagatcgagtgggagctgcagaaggaaaacagcaaacgctggaatcccgaaattcagtacacttccaactacaacaagtctgttaatgtggactttactgtggacactaatggcgtgtattcagagcctcgccccattggcaccagatacctgactcgtaatctgtaa

SEQ ID NO: 4316 - DNA, 2208 bp, Artificial Sequence
  source: /note="Description of Artificial Sequence: Synthetic polynucleotide"
atggctgccgatggttatcttccagattggctcgaggacactctctctgaaggaataagacagtggtggaagctcaaacctggcccaccaccaccaaagcccgcagagcggcataaggacgacagcaggggtcttgtgcttcctgggtacaagtacctcggacccttcaacggactcgacaagggagagccggtcaacgaggcagacgccgcggccctcgagcacgacaaagcctacgaccggcagctcgacagcggagacaacccgtacctcaagtacaaccacgccgacgcggagtttcaggagcgccttaaagaagatacgtcttttgggggcaacctcggacgagcagtattccaggcgaaaaagagggttcttgaacctctgggcctggttgaggagcctgttaagacggctccgggaaaaaagaggccggtagagcactctcctgtggagccagactcctcctcgggaaccggaaaagcgggccagcagcctgcaagaaaaagattgaattttggtcagactggagacgcagactccgtacctgacccccagcctctcggacagccaccagcagcccccacaagtttgggatctactacaatggctacaggcagtggcgcaccaatggcagacaataacgagggtgccgatggagtgggtaattcctcrggaaattggcattgcgattccacatggatgggcgacagagtcatcaccaccagcacccgaacctgggccctgcccacctacaacaaccacctctacaaacaaatttccagccaatcaggagcctcgaacgacaatcactactttggctacagcaccccttgggggtattttgacttcaacagattccactgccacttttcaccacgtgactggcaaagactcatcaacaacaactggggattccgacccaagagactcaacttcaagctctttaacattcaagtcaaagaggtcacgcagaatgacggtacgacgacgattgccaataaccttaccagcacggttcaggtgtttactgactcggagtaccagctcccgtacgtcctcggctcggcgcatcaaggatgcctcccgccgttcccagcagacgtcttcatggtgccacagtatggatacctcaccctgaacaacgggagtcaggcagtaggacgctcttcattttactgcctggagtactttccttctcagatgctgcgtaccggaaacaactttaccttcagctacacttttgaggacgttcctttccacagcagctacgctcacagccagagtctggaccgtctcatgaatcctctcatcgaccagtacctgtattacttgagcagaacaaacactccaagtggaaccaccacgcagtcaaggcttcagttttctcaggccggagcgagtgacattcgggaccagtctaggaactggcttcctggaccctgttaccgccagcagcgagtatcaaagacatctgcggataacaacaacagtgaatactcgtggactggagctaccaagtaccacctcaatggcagagactctctggtgaatccgggcccggccatggcaagccacaaggacgatgaagaaaagttttttcctcagagcggggttctcatctttgggaagcaaggctcagagaaaacaaatgtggacattgaaaaggtcatgattacagacgaagaggaaatcaggacaaccaatcccgtggctacggagcagtatggttctgtatctaccaacctccagagaggcaacagacaagcagctaccgcagatgtcaacacacaaggcgttcttccaggcatggtctggcaggacagagatgtgtaccttcaggggcccatctgggcaaagattccacacacggacggacattttcacccctctcccctcatgggtggattcggacttaaacaccctcctccacagattctcatcaagaacaccccggtacctgcgaatccttcgaccaccttcagtgcggcaaagtttgcttccttcatcacacagtactccacgggacaggccagcgtggagatcgagtgggagctgcagaaggaaaacagcaaacgctggaatcccgaaattcagtacacttccaactacaacaagtctgttaatgtggactttactgtggacactaatggcgtgtattcagagcctcgccccattggcaccagatacctgactcgtaatctgtaa

SEQ ID NO: 4317 - DNA, 2208 bp, Artificial Sequence
  source: /note="Description of Artificial Sequence: Synthetic polynucleotide"
atggctgccgatggttatcttccagattggctcgaggacactctctctgaaggaataagacagtggtggaagctcaaacctggcccaccaccgccaaagcccgcagagcggcacaaggacgccagtaggggtcttgtgcttcctgggtacaagtacctcggacccttcaacggactcgacaaaggagagccggtcaacgaggcagacgccgcggccctcgagcacgacaaggcctacgaccggcagctcgacagcggagacaacccgtacctcaagtacaaccacgccgacgcggagtttcaggagcgtcttaaagaagatacgtcttttgggggcaacctcggacgagcagtattccaggcgaaaaagagggttcttgaacctctgggcctggttgaggaacctgttaagacggctccgggaaaaaagaggccggtagagcactctcctgtggagccagactcctcctcgggaaccggaaaggcgggccagcagcctgcaagaaaaagattgaattttggtcagactggagacgcagactcagtacctgacccccagcctctcggacagccaccagcagccccctctggtctgggaactaatacgatggctacaggcagtggcgcaccaatggcagacaataacgagggcgccgacggagtgggtaattcctcgggaaattggcattgcgattccacatggatgggcgacagagtcatcaccaccagcacccgaacctgggccctgcccacctacaacaaccacctctacaaacaaatttccagccaatcaggagcctcgaacgacaatcactactttggctacagcaccccttgggggtattttgacttcaacagattccactgccacttttcaccacgtgactggcaaagactcatcaacaacaactggggattccgacccaagagactcaacttcaagctctttaacattcaagtcaaagaggtcacgcagaatgacggtacgacgacgattgccaataaccttaccagcacggttcaggtgtttactgactcggagtaccagctcccgtacgtcctcggctcggcgcatcaaggatgcctcccgccgttcccagcagacgtcttcatggtgccacagtatggatacctcaccctgaacaacgggagtcaggcagtaggacgctcttcattttactgcctggagtactttccttctcagatgctgcgtaccggaaacaactttaccttcagctacacttttgaggacgttcctttccacagcagctacgctcacagccagagtctggaccgtctcatgaatcctctcatcgaccagtacctgtattacttgagcagaacaaacactccaagtggaaccaccacgcagtcaaggcttcagttttctcaggccggagcgagtgacattcgggaccagtctaggaactggcttcctggaccctgttaccgccagcagcgagtatcaaagacatctgcggataacaacaacagtgaatactcgtggactggagctaccaagtaccacctcaatggcagagactctctggtgaatccgggcccggccatggcaagccacaaggacgatgaagaaaagttttttcctcagagcggggttctcatctttgggaagcaaggctcagagaaaacaaatgtggacattgaaaaggtcatgattacagacgaagaggaaatcaggacaaccaatcccgtggctacggagcagtatggttctgtatctaccaacctccagagaggcaacaggcaagcagctaccgcagatgtcaacacacaaggcgttcttccaggcatggtctggcaggacagagatgtgtaccttcaggggcccatctgggcaaagattccacacacggacggacattttcacccctctcccctcatgggtggattcggacttaaacaccctcctccacagattctcatcaagaacaccccggtacctgcgaatccttcgaccaccttcagtgcggcaaagtttgcttccttcatcacacagtactccacgggacaggtcagcgtggagatcgagtgggagctgcagaaggaaaacagcaaacgctggaatcccgaaattcagtacacttccaactacaacaagtctgttaatgtggactttactgtggacactaatggcgtgtattcagagcctcgccccattggcaccagatacctgactcgtaatctgtaa

SEQ ID NO: 4318 - DNA, 2208 bp, Artificial Sequence
  source: /note="Description of Artificial Sequence: Synthetic polynucleotide"
atggctgccgatggttatcttccagattggctcgaggacactctctctgaaggaataagacagtggtggaagctcaaacctggcccaccaccgccaaagcccgcagagcggcacaaggacgccagtaggggtcttgtgcttcctgggtacaagtacctcggacccttcaacggactcgacaaaggagagccggtcaacgaggcagacgccgcggccctcgagcacgacaaggcctacgaccggcagctcgacagcggagacaacccgtacctcaagtacaaccacgccgacgcggagtttcaggagcgtcttaaagaagatacgccttttgggggcaacctcggacgagcagtattccaggcgaaaaagagggttcttgaacctctgggcctggttgaggagcctgttaagacggctccgggaaaaaagaggccggtagagcactctcctgtggagccagactcctcctcgggaaccggaaaagcgggccagcggcctgcaagaaaaagattgaattttggtcagactggagacgcagactccgtacctgacccccagcctctcggacagccaccagcagcccccacaagtttgggatctactacaatggctacaggcagtggcgcaccaatggcagacaataacgagggtgccgatggagtgggtaattcctcaggaaattggcattgcgattcccaatggctgggcgacagagtcatcaccaccagcacccgaacctgggccctgcccacctacaacaaccacctctacaagcaaatccccagccaatcaggagcatcgaacgacaaccactactttggctacagcaccccttgggggtattttgacttcaacagattccactgtcacttctccccacgtgactggcaaagactcatcaacaacaactggggattccgacccaagagactcaacttcaagctctttaacattcaagtcaaagaggtcacgcagaatgacggtacgacgacgattgccaataaccttaccagcacggttcaggtgtttactgactcggagtaccagctcccgtacgtcctcggctcggcgcatcaaggatgcctcccgccgttcccagcagacgtcttcatggtgccacagtatggatacctcaccctgaacaacgggagtcaggcagtaggacgctcttcattttactgcctggagtactttccttctcagatgctgcgtaccggaaacaactttaccttcagctacacttttgaggacgttcctttccacagcagctacgctcacagccagagtctggaccgtctcatgaatcctctcatcgaccagtacctgtattacttgagcagaacaaacactccaagtggaaccaccacgcagtcaaggcttcagttttctcaggccggagcgagtgacattcgggaccagtctaggaactggcttcctggaccctgttaccgccagcagcgagtatcaaagacatctgcggataacaacaacagtgaatactcgtggactggagctaccaagtaccacctcaatggcagagactctctggtgaatccgggcccggccatggcaagccacaaggacgatgaagaaaagttttttcctcagagcggggttctcatctttgggaagcaaggctcagagaaaacaaatgtggacattgaaaaggtcatgattacagacgaagaggaaatcaggacaaccaatcccgtggctacggagcagtatggttctgtatctaccaacctccagagaggcaacagacaagcagctaccgcagatgtcaacacacaaggcgttcttccaggcatggtctggcaggacagagatgtgtaccttcaggggcccatctgggcaaagattccacacacggacggacattttcacccctctcccctcatgggtggattcggacttaaacaccctcctccacagattctcatcaagaacaccccggtacctgcgaatccttcgaccaccttcagtgcggcaaagtttgcttccttcatcacacagtactccacgggacaggccagcgtggagatcgagtgggagctgcagaaggaaaacagcaaacgctggaatcccgaaattcagtacacttccaactacaacaagtctgttaatgtggactttactgtggacactaatggcgtgtattcagagcctcgccccattggcaccagatacctgactcgtaatctgtaa

SEQ ID NO: 4319 - DNA, 2208 bp, Artificial Sequence
  source: /note="Description of Artificial Sequence: Synthetic polynucleotide"
atggctgccgatggttatcttccagattggctcgaggacactctctctgaaggaataagacagtggtggaagctcaaacctggcccaccaccgccaaagcccgcagagcggcacaaggacgacagtaggggtcttgtgcttcctgggtacaagtacctcggacccttcaacggactcgacaaaggagagccggtcaacgaggcagacgccgcggccctcgagcacgacaaggcctacgaccggcagctcgacagcggagacaacccgtacctcaagtacaaccacgccgacgcggagtttcaggagcgtcttaaagaagatacgtcttttgggggcaacctcggacgagcagtattccaggcgaaaaagagggttcttgaacctctgggcctggttgaggagcctgttaagacggctccgggaaaaaagaggccggtagagcactctcctgtggagccagactcctcctcgggaaccggaaaagcgggccagcagcctgcaagaaaaagattgaattttggtcagactggagacgcagactccgtacctgacccccagcctctcggacagccaccagcagcccccacaagtttgggatctactacaatggctacaggcagtggcgcaccaatggcagacaataacgagggtgccgatggagtgggtaattcctcaggaaattggcattgcgattccacatggatgggcgacagagtcatcaccaccagcacccgaacctgggccctgcccacctacaacaaccacctctacaaacaaatttccagccaatcaggagcctcgaacgacaatcactactttggctacagcaccccttgggggtattttgacttcaacagattccactgccacttttcaccacgtgactggcaaagactcatcaacaacaactggggattccgacccaagagactcaacttcaagctctttaacattcaagtcaaagaggtcacgcagaatgacggtacgacgacgattgccaataaccttaccagcacggttcaggtgtttactgactcggagtaccagctcccgtacgtcctcggctcggcgcatcaaggatgcctcccgccgttcccagcagacgtcttcatggtgccacagtatggatacctcaccctgaacaacgggagtcaggcagtaggacgctcttcattttactgcctggagtactttccttctcagatgctgcgtaccggaaacaactttaccttcagctacacttttgaggacgttcctttccacagcagctacgctcacagccagagtctggaccgtctcatgaatcctctcaccgaccagtacctgtattacttgagcagaacaaacactccaagtggaaccaccacgcagtcaaggcttcagttttctcaggccggagcgagtgacattcgggaccagtctaggaactggcttcctggaccctgttaccgccagcagcgagtatcaaagacatctgcggataacaacaacagtgaatactcgtggactggagctaccaagtaccacctcaatggcagagactctctggtgaatccgggcccggccatggcaagccacaaggacgatgaagaaaagttttttcctcagagcggggttctcatctttgggaagcaaggctcagagaaaacaaatgtggacattgaaaaggtcatgattacagacgaagaggaaatcaggacaaccaatcccgtggctacggagcagtatggttctgtatctaccaacctccagagaggcaacagacaagcagctaccgcagatgtcaacacacaaggcgttcttccaggcatggtctggcaggacagagatgtgtaccttcaggggcccatctgggcaaagattccacacacggacggacattttcacccctctcccctcatgggtggattcggacttaaacaccctcctccacagattctcatcaagaacaccccggtacctgcgaatccttcgaccaccttcagtgcggcaaagtttgcttccttcatcacacagtactccacgggacaggtcagcgtggagatcgagtgggagctgcagaaggaaaacagcaaacgctggaatcccgaaattcagtacacttccaactacaacaagtctgttaatgtggactttactgtggacactaatggcgtgtattcagagcctcgccccattggcaccagatacctgactcgtaatctgtaa

SEQ ID NO: 4320 - DNA, 2208 bp, Artificial Sequence
  source: /note="Description of Artificial Sequence: Synthetic polynucleotide"
atggctgccgatggttatcttccagattggctcgaggacactctctctgaaggaataagacagtggtggaagctcaaacctggcccaccaccaccaaagcccgcagagcggcataaggacgacagcaggggtcttgtgcttcctgggtacaagtacctcggacccttcaacggactcgacaagggagagccggtcaacgaggcagacgccgcggccctcgagcacgacaaagcctacgaccggcagctcgacagcggagacaacccgtacctcaagtacaaccacgccgacgcggagtttcaggagcgccttaaagaagatacgtcttttgggggcaacctcggacgagcagtcttccaggcgaaaaagagggttcttgaacctctgggcctggttgaggaacctgttaagacggctccgggaaaaaagaggccggtagagcactctcctgtggagccagactcctcctcgggaaccggaaaggcgggccagcagcctgcaagaaaaagattgaattttggtcagactggagacgcagactcagtacctgacccccagcctctcggacagccaccagcagccccctctggtctgggaactaatacgatggctacaggcagtggcgcaccaatggcagacaataacgagggcgccgacggagtgggtaattcctcgggaaattggcattgcgattccacatggatgggcgacagagtcatcaccaccagcacccgaacctgggccctgcccacctacaacaaccacctctacaaacaaatttccagccaatcaggagcctcgaacgacaatcactactttggctacagcaccccttgggggtattttgacttcaacagattccactgccacttttcaccacgtgactggcaaagactcatcaacaacaactggggattccgacccaagagactcaacttcaagctctttaacattcaagtcaaagaggtcacgcagaatgacggtacgacgacgattgccaataaccttaccagcacggttcaggtgtttactgactcggagtaccagctcccgtacgtcctcggctcggcgcatcaaggatgcctcccgccgttcccagcagacgtcttcatggtgccacagtatggatacctcaccctgaacaacgggagtcaggcagtaggacgctcttcattttactgcctggagtactttccttctcagatgctgcgtaccggaaacaactttaccttcagctacacttttgaggacgttcctttccacagcagctacgctcacagccagagtctggaccgtctcatgaatcctctcatcgaccagtacctgtattacttgagcagaacaaacactccaagtggaaccaccgcgcagtcaaggcttcagttttctcaggccggagcgagtgacattcgggaccagtctaggaactggcttcctggaccctgttaccgccagcagcgagtatcaaagacatctgcggataacaacaacagtgaatactcgtggactggagctaccaagtaccacctcaatggcagagactctctggtgaatccgggcccggccatggcaagccacaaggacgatgaagaaaagttttttcctcagagcggggttctcatctttgggaagcaaggctcagagaaaacaaatgtggacattgaaaaggtcatgattacagacgaagaggaaatcaggacaaccaatcccgtggctacggagcagtatggttctgtatctaccaacctccagagaggcaacagacaagcagctaccgcagatgtcaacacacaaggcgttcttccaggcatggtctggcaggacagagatgtgtaccttcaggggcccatctgggcaaagattccacacacggacggacattttcacccctctcccctcatgggtggattcggacttaaacaccctcctccacagattctcatcaagaacaccccggtacctgcgaatccttcgaccaccttcagtgcggcaaagtttgcttccttcatcacacagtactccacgggacaggtcagcgtggagatcgagtgggagctgcagaaggaaaacagcaaacgctggaatcccgaaattcagtacacttccaactacaacaagtctgttaatgtggactttactgtggacactaatggcgtgtattcagagcctcgccccattggcaccagatacctgactcgtaatctgtaa

SEQ ID NO: 4321 - DNA, 2208 bp, Artificial Sequence
  source: /note="Description of Artificial Sequence: Synthetic polynucleotide"
atggctgccgatggttatcttccagattggctcgaggacactctctctgaaggaataagacagtggtggaagctcaaacctggcccaccaccaccaaagcccgcagagcggcataaggacgacagcaggggtcttgtgcttcctgggtacaagtacctcggacccttcaacggactcgacaagggagagccggtcaacgaggcagacgccgcggccctcgagcacgacaaagcctacgaccggcagctcgacagcggagacaacccgtacctcaagtacaaccacgccgacgcggagtttcaggagcgccttaaagaagatacgtcttttgggggcaacctcggacgagcagtcttccaggcgaaaaagagggttcttgaacctctgggcctggttgaggaacctgttaagacggctccgggaaaaaagaggccggtagagcactctcctgtggagccagactcctcctcgggaaccggaaaggcgggccagcagcctgcaagaaaaagattgaattttggtcagactggagacgcagactcagtacctgacccccagcctctcggacagccaccagcagccccctctggtctgggaactaatacgatggctacaggcagtggcgcaccaatggcagacaataacgagggcgccgacggagtgggtaattcctcgggaaattggcattgcgattccacatggatgggcgacagagtcatcaccaccagcacccgaacctgggccctgcccacctacaacaaccacctctacaaacaaatttccagccaatcaggagcctcgaacggcaatcactactttggctacagcaccccttgggggtattttgacttcaacagattccactgccacttttcaccacgtgactggcaaagactcatcaacaacaactggggattccgacccaagagactcaacttcaagctctttaacattcaagtcaaagaggtcacgcagaatgacggtacgacgacgattgccaataaccttaccagcacggttcaggtgtttactgactcggagtaccagctcccgtacgtcctcggctcggcgcatcaaggatgcctcccgccgttcccagcagacgtcttcatggtgccacagtatggatacctcaccctgaacaacgggagtcaggcagtaggacgctcttcattttactgcctggagtactttccttctcagatgctgcgtaccggaaacaactttaccttcagctacacttttgaggacgttcctttccacagcagctacgctcacagccagagtctggaccgtctcatgaatcctctcatcgaccagtacctgtattacttgagcagaacaaacactccaagtggaaccaccacgcagtcaaggcttcagttttctcaggccggagcgagtgacattcgggaccagtctaggaactggcttcctggaccctgttaccgccagcagcgagtatcaaagacatctgcggataacaacaacagtgaatactcgtggactggagctaccaagtaccacctcaatggcagagactctctggtgaatccgggcccggccatggcaagccacaaggacgatgaagaaaagttttttcctcagagcggggttctcatctttgggaagcaaggctcagagaaaacaaatgtggacattgaaaaggtcatgattacagacgaagaggaaatcaggacaaccaatcccgtggctacggagcagtatggttctgtatctaccaacctccagagaggcaacagacaagcagctaccgcagatgtcaacacacaaggcgttcttccaggcatggtctggcaggacagagatgtgtaccttcaggggcccatctgggcaaagattccacacacggacggacattttcacccctctcccctcatgggtggattcggacttaaacaccctcctccacagattctcatcaagaacaccccggtacctgcgaatccttcgaccaccttcagtgcggcaaagtttgcttccttcatcacacagtactccacgggacaggtcagcgtggagatcgagtgggagctgcagaaggaaaacagcaaacgctggaatcccgaaattcagtacacttccaactacaacaagtctgttaatgtggactttactgtggacactaatggcgtgtattcagagcctcgccccattggcaccagatacctgactcgtaatctgtaa

SEQ ID NO: 4322 - DNA, 2208 bp, Artificial Sequence
  source: /note="Description of Artificial Sequence: Synthetic polynucleotide"
atggctgccgatggttatcttccagattggctcgaggacactctctctgaaggaataagacagtggtggaagctcaaacctggcccaccaccaccaaagcccgcagagcggcataaggacgacagcaggggtcttgtgcttcctgggtacaagtacctcggacccttcaacggactcgacaagggagagccggtcaacgaggcagacgccgcggccctcgagcacgacaaagcctacgaccggcagctcgacagcggagacaacccgtacctcaagtacaaccacgccgacgcggagtttcaggagcgccttaaagaagatacgtcttttgggggcaacctcggacgagcagtcttccaggcgaaaaagagggttcttgaacctctgggcctggttgaggaacctgttaagacggctccgggaaaaaagaggccggtagagcactctcctgtggagccagactcctcctcgggaaccggaaaggcgggccagcagcctgcaagaaaaagattgaattttggtcagactggagacgcagactcagtacctgacccccagcctctcggacagccaccagcagccccctctggtctgggaactaatacgatggctacaggcagtggcgcaccaatggcagacaataacgagggcgccgacggagtgggtaattcctcgggaaattggcattgcgattccacatggatgggcgacagagtcatcaccaccagcacccgaacctgggccctgcccacctacaacaaccacctctacaaacaaatttccagccaatcaggagcctcgaacgacaatcactactttggctacagcaccccttgggggtattttgacttcaacagattccactgccacttttcaccacgtgactggcaaagactcatcaacaacaactggggattccgacccaagagactcaacttcaagctctttaacattcaagtcaaagaggtcacgcagaatgacggtacgacgacgattgccaataaccttaccagcacggttcaggtgtttactgactcggagtaccagctcccgtacgtcctcggctcggcgcatcaaggatgcctcccgccgttcccagcagacgtcttcatggtgccacagtatggatacctcaccctgaacaacgggagtcaggcagtaggacgctcttcattttactgcctggagtactttccttctcagatgctgcgtaccggaaacaactttaccttcagctacacttttgaggacgttcctttccacagcagctacgctcacagccagagtctggaccgtctcatgaatcctctcatcgaccagtacctgtattacttgagcagaacaaacactccaagtggaaccaccacgcagtcaaggcttcagttttctcaggccggagcgagtgacattcgggaccagtctaggaactggcttcctggaccctgttaccgccagcagcgagtatcaaagacatctgcggataacaacaacagtgaatactcgtggactggagctaccaagtaccacctcaatggcagagactctctggtgaatccgggcccggccatggcaagccacaaggacgatgaagaaaagttttttcctcagagcggggttctcatctttgggaagcaaggctcagagaaaacaaatgtggacattgaaagggtcatgattacagacgaagaggaaatcaggacaaccaatcccgtggctacggagcagtatggttctgtatctaccaacctccagagaggcaacagacaagcagctaccgcagatgtcaacacacaaggcgttcttccaggcatggtctggcaggacagagatgtgtaccttcaggggcccatctgggcaaagattccacacacggacggacattttcacccctctcccctcatgggtggattcggacttaaacaccctcctccacagattctcatcaagaacaccccggtacctgcgaatccttcgaccaccttcagtgcggcaaagtttgcttccttcatcacacagtactccacgggacaggtcagcgtggagatcgagtgggagctgcagaaggaaaacagcaaacgctggaatcccgaaattcagtacacttccaactacaacaagtctgttaatgtggactttactgtggacactaatggcgtgtattcagagcctcgccccattggcaccagatacctgactcgtaatctgtaa

SEQ ID NO: 4323 - DNA, 2208 bp, Artificial Sequence
  source: /note="Description of Artificial Sequence: Synthetic polynucleotide"
atggctgccgatggttatcttccagattggctcgaggacactctctctgaaggaataagacagtggtggaagctcaaacctggcccaccaccaccaaagcccgcagagcggcataaggacgacagcaggggtcttgtgcttcctgggtacaagtacctcggacccttcaacggactcgacaagggagagccggtcaacgaggcagacgccgcggccctcgagcacgacaaagcctacgaccggcagctcgacagcggagacaacccgtacctcaagtacaaccacgccgacgcggagtttcaggagcgccttaaagaagatacgtcttttgggggcaacctcggacgagcagtcttccaggcgaaaaagagggttcttgaacctctgggcctggttgaggaacctgttaagacggctccgggaaaaaagaggccggtagagcactctcctgtggagccagactcctcctcgggaaccggaaaggcgggccagcagcctgcaagaaaaagattgaattttggtcagactggagacgcagactcagtacctgacccccagcctctcggacagccaccagcagccccctctggtctgggaactaatacgatggctacaggcagtggcgcaccaatggcagacaataacgagggcgccgacggagtgggtaattcctcgggaaattggcattgcgattccacatggatgggcgacagagtcatcaccaccagcacccgaacctgggccctgcccacctacaacaaccacctctacaaacaaatttccagccaatcaggagcctcgaacgacaatcactgctttggctacagcaccccttgggggtattttgacttcaacagattccactgccacttttcaccacgtgactggcaaagactcatcaacaacaactggggattccgacccaagagactcaacttcaagctctttaacattcaagtcaaagaggtcacgcagaatgacggtacgacgacgattgccaataaccttaccagcacggttcaggtgtttactgactcggagtaccagctcccgtacgtcctcggctcggcgcatcaaggatgcctcccgccgttcccagcagacgtcttcatggtgccacagtatggatacctcaccctgaacaacgggagtcaggcagtaggacgctcttcattttactgcctggagtactttccttctcagatgctgcgtaccggaaacaactttaccttcagctacacttttgaggacgttcctttccacagcagctacgctcacagccagagtctggaccgtctcatgaatcctctcatcgaccagtacctgtattacttgagcagaacaaacactccaagtggaaccaccacgcagtcaaggcttcagttttctcaggccggagcgagtgacattcgggaccagtctaggaactggcttcctggaccctgttaccgccagcagcgagtatcaaagacatctgcggataacaacaacagtgaatactcgtggactggagctaccaagtaccacctcaatggcagagactctctggtgaatccgggcccggccatggcaagccacaaggacgatgaagaaaagttttttcctcagagcggggttctcatctttgggaagcaaggctcagagaaaacaaatgtggacattgaaaaggtcatgattacagacgaagaggaaatcaggacaaccaatcccgtggctacggagcagtatggttctgtatctaccaacctccagagaggcaacagacaagcagctaccgcagatgtcaacacacaaggcgttcttccaggcatggtctggcaggacagagatgtgtaccttcaggggcccatctgggcaaagattccacacacggacggacattttcacccctctcccctcatgggtggattcggacttaaacaccctcctccacagattctcatcaagaacaccccggtacctgcgaatccttcgaccaccttcagtgcggcaaagtttgcttccttcatcacacagtactccacgggacaggtcagcgtggagatcgagtgggagctgcagaaggaaaacagcaaacgctggaatcccgaaattcagtacacttccaactacaacaagtctgttaatgtggactttactgtggacactaatggcgtgtattcagagcctcgccccattggcaccagatacctgactcgtaatctgtaa

SEQ ID NO: 4324 - DNA, 2208 bp, Artificial Sequence
  source: /note="Description of Artificial Sequence: Synthetic polynucleotide"
atggctgccgatggttatcttccagattggctcgaggacactctctctgaaggaataagacagtggtggaagctcaaacctggcccaccaccaccaaagcccgcagagcggcataaggacgacagcaggggtcttgtgcttcctgggtacaagtacctcggacccttcaacggactcgacaagggagagccggtcaacgaggcagacgccgcggccctcgagcacgacaaagcctacgaccggcagctcgacagcggagacaacccgtacctcaagtacaaccacgccgacgcggagtttcaggagcgccttaaagaagatacgtcttttgggggcaacctcggacgagcagtcttccaggcgaaaaagagggttcttgaacctctgggcctggttgaggaacctgttaagacggctccgggaaaaaagaggccggtagagcactctcctgtggagccagactcctcctcgggaaccggaaaggcgggccagcagcctgcaagaaaaagattgaattttggtcagactggagacgcagactcagtacctgacccccagcctctcggacagccaccagcagccccctctggtctgggaactaatacgatggctacaggcagtggcgcaccaatggcagacaataacgagggcgccgacggagtgggtaattcctcgggaaattggcattgcgattccacatggatgggcgacagagtcatcaccaccagcacccgaacctgggccctgcccacctacaacaaccacctctacaaacaaatttccagccaatcaggagcctcgaacgacaatcactactttggctacagcaccccttgggggtattttgacttcaacagattccactgccacttttcaccacgtgactggcaaagactcatcaacaacaactggggattccgacccaagagactcaacttcaagctctttaacattcaagtcaaagaggtcacgcagaatgacggtacgacgacgattgccaataaccttaccagcacggttcaggtgtttactgactcggagtaccagctcccgtacgtcctcggctcggcgcatcaaggatgcctcccgccgttcccagcagacgtcttcatggtgccacagtatggatacctcaccctgaacaacgggagtcaggcagtaggacgctcttcattttactgcctggagtactttccttctcagatgctgcgtaccggaaacaactttaccttcagctacacttttgaggacgttcctttccacagcagctacgctcacagccagagtctggaccgtctcatgaatcctctcatcgaccagtacctgtattacttgagcagaacaaacactccaagtggaaccaccacgcagtcaaggcttcagttttctcaggccggagcgagtgacattcgggaccagtctaggaactggcttcctggaccctgttaccgccagcagcgagtatcaaagacatctgcggataacaacaacagtgaatactcgtggactggagctaccaagtaccacctcaatggcagagactctctggtgaatccgggcccggccatggcaagccacaaggacgatgaagaaaagttttttcctcagagcggggttctcatctttgggaagcaaggctcagagaaaacaaatgtggacattgaaaaggtcatgattacagacgaagaggaaatcaggacaaccaatcccgtggctacggagcagtatggttctgtatctaccaacctccagagaggcaacagacaagcagctaccgcagatgtcaacacacaaggcgttcttccaggcatggtctggcaggacagagatgtgtaccttcaggggcccatctgggcaaagattccacacacggacggacattttcacccctctcccctcatgggtggattcggacttaaacaccctcctccacagattctcatcaagaacaccccggtacctgcgaatccttcgaccaccttcagtgcggcaaagtttgcttccttcatcacacagtactccacgggacaggtcagcgtggagatcgagtgggagctgcagaaggaaaacagcaaacgctggaatcccgaaattcagtacacttccaactacaacaagtctgttaatgcggactttactgtggacactaatggcgtgtattcagagcctcgccccattggcaccagatacctgactcgtaatctgtaa

SEQ ID NO: 4325 - DNA, 2208 bp, Artificial Sequence
  source: /note="Description of Artificial Sequence: Synthetic polynucleotide"
atggctgccgatggttatcttccagattggctcgaggacactctctctgaaggaataagacagtggtggaagctcaaacctggcccaccaccaccaaagcccgcagagcggcatagggacgacagcaggggtcttgtgcttcctgggtacaagtacctcggacccttcaacggactcgacaagggagagccggtcaacgaggcagacgccgcggccctcgagcacgacaaagcctacgaccggcagctcgacagcggagacaacccgtacctcaagtacaaccacgccgacgcggagtttcaggagcgccttaaagaagatacgtcttttgggggcaacctcggacgagcagtcttccaggcgaaaaagagggttcttgaacctctgggcctggttgaggaacctgttaagacggctccgggaaaaaagaggccggtagagcactctcctgtggagccagactcctcctcgggaaccggaaaggcgggccagcagcctgcaagaaaaagattgaattttggtcagactggagacgcagactcagtacctgacccccagcctctcggacagccaccagcagccccctctggtctgggaactaatacgatggctacaggcagtggcgcaccaatggcagacaataacgagggcgccgacggagtgggtaattcctcgggaaattggcattgcgattccacatggatgggcgacagagtcatcaccaccagcacccgaacctgggccctgcccacctacaacaaccacctctacaaacaaatttccagccaatcaggagcctcgaacggcaatcactactttggctacagcaccccttgggggtattttgacttcaacagattccactgccacttttcaccacgtgactggcaaagactcatcaacaacaactggggattccgacccaagagactcaacttcaagctctttaacattcaagtcaaagaggtcacgcagaatgacggtacgacgacgattgccaataaccttaccagcacggttcaggtgtttactgactcggagtaccagctcccgtacgtcctcggctcggcgcatcaaggatgcctcccgccgttcccagcagacgtcttcatggtgccacagtatggatacctcaccctgaacaacgggagtcaggcagtaggacgctcttcattttactgcctggagtactttccttctcagatgctgcgtaccggaaacaactttaccttcagctacacttttgaggacgttcctttccacagcagctacgctcacagccagagtctggaccgtctcatgaatcctctcatcgaccagtacctgtattacttgagcagaacaaacactccaagtggaaccaccacgcagtcaaggcttcagttttctcaggccggagcgagtgacattcgggaccagtctaggaactggcttcctggaccctgttaccgccagcagcgagtatcaaagacatctgcggataacaacaacagtgaatactcgtggactggagctaccaagtaccacctcaatggcagagactctctggtgaatccgggcccggccatggcaagccacaaggacgatgaagaaaagttttttcctcagagcggggttctcatctttgggaagcaaggctcagagaaaacaaatgtggacattgaaaaggtcatgattacagacgaagaggaaatcaggacaaccaatcccgtggctacggagcagtatggttctgtatctaccaacctccagaggggcaacagacaagcagctaccgcagatgtcaacacacaaggcgttcttccaggcatggtctggcaggacagagatgtgtaccttcaggggcccatctgggcaaagattccacacacggacggacattttcacccctctcccctcatgggtggattcggacttaaacaccctcctccacagattctcatcaagaacaccccggtacctgcgaatccttcgaccaccttcagtgcggcaaagtttgcttccttcatcacacagtactccacgggacaggtcagcgtggagatcgagtgggagctgcagaaggaaaacagcaaacgctggaatcccgaaattcagtacacttccaactacaacaagtctgttaatgtggactttactgtggacactaatggcgtgtattcagagcctcgccccattggcaccagatacctgactcgtaatctgtaa

SEQ ID NO: 4326 - DNA, 2208 bp, Artificial Sequence
  source: /note="Description of Artificial Sequence: Synthetic polynucleotide"
atggctgccgatggttatcttccagattggctcgaggacactctctctgaaggaataagacagtggtggaagctcaaacctggcccaccaccaccaaagcccgcagagcggcataaggacgacagcaggggtcttgtgcttcctgggtacaagtacctcggacccttcaacggactcgacaagggagagccggtcaacgaggcagacgccgcggccctcgagcacgacaaagcctacgaccggcagctcgacagcggagacaacccgtacctcaagtacaaccacgccgacgcggagtttcaggagcgccttaaagaagatacgtcttttgggggcaacctcggacgagcagtcttccaggcgaaaaagagggttcttgaacctctgggcctggttgaggaacctgttaagacggctccgggaaaaaagaggccggtagagcactctcctgtggagccagactcctcctcgggaaccggaaaggcgggccagcagcctgcaagaaaaagattgaattttggtcagactggagacgcagactcagtacctgacccccagcctctcggacagccaccagcagccccctctggtctgggaactaatacgatggctacaggcagtggcgcaccaatggcagacaataacgagggcgccgacggagtgggtaattcctcgggaaattggcattgcgattccacatggatgggcgacagagtcatcaccaccagcacccgaacctgggccctgcccacctacaacaaccacctctacaaacaaatttccagccaatcaggagcctcgaacgacaatcactactttggctacagcaccccttgggggtattttgacttcaacagattccactgccacttttcaccacgtgactggcaaagactcatcaacaacaactggggattccgacccaagagactcaacttcaagctctttaacattcaagtcaaagaggtcacgcagaatgacggtacgacgacgattgccaataaccttaccagcacggttcaggtgtttactgactcggagtaccagctcccgtacgtcctcggctcggcgcatcaaggatgcctcccgccgttcccagcagacgtcttcatggtgccacagtatggatacctcaccctgaacaacgggagtcgggcagtaggacgctcttcattttactgcctggagtactttccttctcagatgctgcgtaccggaaacaactttaccttcagctacacttttgaggacgttcctttccacagcagctacgctcacagccagagtctggaccgtctcatgaatcctctcatcgaccagtacctgtattacttgagcagaacaaacactccaagtggaaccaccacgcagtcaaggcttcagttttctcaggccggagcgagtgacattcgggaccagtctaggaactggcttcctggaccctgttaccgccagcagcgagtatcaaaggcatctgcggataacaacaacagtgaatactcgtggactggagctaccaagtaccacctcaatggcagagactctctggtgaatccgggcccggccatggcaagccacaaggacgatgaagaaaagttttttcctcagagcggggttctcatctttgggaagcaaggctcagagaaaacaaatgtggacattgaaaaggtcatgattacagacgaagaggaaatcaggacaaccaatcccgtggctacggagcagtatggttctgtatctaccaacctccagagaggcaacagacaagcagctaccgcagatgtcaacacacaaggcgttcttccaggcatggtctggcaggacagagatgtgtaccttcaggggcccatctgggcaaagattccacacacggacggacattttcacccctctcccctcatgggtggattcggacttaaacaccctcctccacagattctcatcaagaacaccccggtacctgcgaatccttcgaccaccttcagtgcggcaaagtttgcttccttcatcacacagtactccacgggacaggtcagcgtggagatcgagtgggagctgcagaaggaaaacagcaaacgctggaatcccgaaattcagtacacttccaactacaacaagtctgttaatgtggactttactgtggacactaatggcgtgtattcagagcctcgccccattggcaccagatacctgactcgtaatctgtaa

SEQ ID NO: 4327 - DNA, 2208 bp, Artificial Sequence
  source: /note="Description of Artificial Sequence: Synthetic polynucleotide"
atggctgccgatggttatcttccagattggctcgaggacactctctctgaaggaataagacagtggtggaagctcaaacctggcccaccaccaccaaagcccgcagagcggcatagggacgacagcaggggtcttgtgcttcctgggtacaagtacctcggacccttcaacggactcgacaagggagagccggtcaacgaggcagacgccgcggccctcgagcacgacaaagcctacgaccggcagctcgacagcggagacaacccgtacctcaagtacaaccacgccgacgcggagtttcaggagcgccttaaagaagatacgtcttttgggggcaacctcggacgagcagtcttccaggcgaaaaagagggttcttgaacctctgggcctggttgaggaacctgttaagacggctccgggaaaaaagaggccggtagagcactctcctgtggagccagactcctcctcgggaaccggaaaggcgggccagcagcctgcaagaaaaagattgaattttggtcagactggagacgcagactcagtacctgacccccagcctctcggacagccaccagcagccccctctggtctgggaactaatacgatggctacaggcagtggcgcaccaatggcagacaataacgagggcgccgacggagtgggtaattcctcgggaaattggcattgcgattccacatggatgggcgacagagtcatcaccaccagcacccgaacctgggccctgcccacctacaacaaccacctctacaaacaaatttccagccaatcaggagcctcgaacggcaatcactactttggctacagcaccccttgggggtattttgacttcaacagattccactgccacttttcaccacgtgactggcaaagactcatcaacaacaactggggattccgacccaagagactcaacttcaagctctttaacattcaagtcaaagaggtcacgcagaatgacggtacgacgacgattgccaataaccttaccagcacggttcaggtgtttactgactcggagtaccagctcccgtacgtcctcggctcggcgcatcaaggatgcctcccgccgttcccagcagacgtcttcatggtgccacagtatggatacctcaccctgaacaacgggagtcaggcagtaggacgctcttcattttactgcctggagtactttccttctcagatgctgcgtaccggaaacaactttaccttcagctacacttttgaggacgttcctttccacagcagctacgctcacagccagagtctggaccgtctcatgaatcctctcatcgaccagtacctgtattacttgagcagaacaaacactccaagtggaaccaccacgcagtcaaggcttcagttttctcaggccggagcgagtggcattcgggaccagtctaggaactggcttcctggaccctgttaccgccagcagcgagtatcaaagacatctgcggataacaacaacagtgaatactcgtggactggagctaccaagtaccacctcaatggcagagactctctggtgaatccgggcccggccatggcaagccacaaggacgatgaagaaaagttttttcctcagagcggggttctcatctttgggaagcaaggctcagagaaaacaaatgtggacattgaaaaggtcatgattacagacgaagaggaaatcaggacaaccaatcccgtggctacggagcagtatggttctgtatctaccaacctccagaggggcaacagacaagcagctaccgcagatgtcaacacacaaggcgttcttccaggcatggtctggcaggacagagatgtgtaccttcaggggcccatctgggcaaagattccacacacggacggacattttcacccctctcccctcatgggtggattcggacttaaacaccctcctccacagattctcatcaagaacaccccggtacctgcgaatccttcgaccaccttcagtgcggcaaagtttgcttccttcatcacacagtactccacgggacaggtcagcgtggagatcgagtgggagctgcagaaggaaaacagcaaacgctggaatcccgaaattcagtacacttccaactacaacaagtctgttaatgtggactttactgtggacactaatggcgtgtattcagagcctcgccccattggcaccagatacctgactcgtaatctgtaa

SEQ ID NO: 4328 - DNA, 2208 bp, Artificial Sequence
  source: /note="Description of Artificial Sequence: Synthetic polynucleotide"
atggctgccgatggttatcttccagattggctcgaggacactctctctgaaggaataagacagtggtggaagctcaaacctggcccaccaccaccaaagcccgcagagcggcatagggacgacagcaggggtcttgtgcttcctgggtacaagtacctcggacccttcaacggactcgacaagggagagccggtcaacgaggcagacgccgcggccctcgagcacgacaaagcctacgaccggcagctcgacagcggagacaacccgtacctcaagtacaaccacgccgacgcggagtttcaggagcgccttaaagaagatacgtcttttgggggcaacctcggacgagcagtcttccaggcgaaaaagagggttcttgaacctctgggcctggttgaggaacctgttaagacggctccgggaaaaaagaggccggtagagcactctcctgtggagccagactcctcctcgggaaccggaaaggcgggccagcagcctgcaagaaaaagattgaattttggtcagactggagacgcagactcagtacctgacccccagcctctcggacagccaccagcagccccctctggtctgggaactaatacgatggctacaggcagtggcgcaccaatggcagacaataacgagggcgccgacggagtgggtaattcctcgggaaattggcattgcgattccacatggatgggcgacagagtcatcaccaccagcacccgaacctgggccctgcccacctacaacaaccacctctacaaacaaatttccagccaatcaggagcctcgaacggcaatcactactttggctacagcaccccttgggggtattttgacttcaacagattccactgccacttttcaccacgtgactggcaaagactcatcaacaacaactggggattccgacccaagagactcaacttcaagctctttaacattcaagtcaaagaggtcacgcagaatgacggtacgacgacgattgccaataaccttaccagcacggttcaggtgtttactgactcggagtaccagctcccgtacgtcctcggctcggcgcatcaaggatgcctcccgccgttcccagcagacgtcttcatggtgccacagtatggatacctcaccctgaacaacgggagtcaggcagtaggacgctcttcattttactgcctggagtactttccttctcagatgctgcgtaccggaaacaactttaccttcagctacacttttgaggacgttcctttccacagcaactacgctcacagccagagtctggaccgtctcatgaatcctctcatcgaccagtacctgtattacttgagcagaacaaacactccaagtggaaccaccacgcagtcaaggcttcagttttctcaggccggagcgagtgacattcgggaccagtctaggaactggcttcctggaccctgttaccgccagcagcgagtatcaaagacatctgcggataacaacaacagtgaatactcgtggactggagctaccaagtaccacctcaatggcagagactctctggtgaatccgggcccggccatggcaagccacaaggacgatgaagaaaagttttttcctcagagcggggttctcatctttgggaagcaaggctcagagaaaacaaatgtggacattgaaaaggtcatgattacagacgaagaggaaatcaggacaaccaatcccgtggctacggagcagtatggttctgtatctaccaacctccagaggggcaacagacaagcagctaccgcagatgtcaacacacaaggcgttcttccaggcatggtctggcaggacagagatgtgtaccttcaggggcccatctgggcaaagattccacacacggacggacattttcacccctctcccctcatgggtggattcggacttaaacaccctcctccacagattctcatcaagaacaccccggtacctgcgaatccttcgaccaccttcagtgcggcaaagtttgcttccttcatcacacagtactccacgggacaggtcagcgtggagatcgagtgggagctgcagaaggaaaacagcaaacgctggaatcccgaaattcagtacacttccaactacaacaagtctgttaatgtggactttactgtggacactaatggcgtgtattcagagcctcgccccattggcaccagatacctgactcgtaatctgtaa

SEQ ID NO: 4329 - DNA, 2208 bp, Artificial Sequence
  source: /note="Description of Artificial Sequence: Synthetic polynucleotide"
atggctgccgatggttatcttccagattggctcgaggacactctctctgaaggaataagacagtggtggaagctcaaacctggcccaccaccaccaaagcccgcagagcggcataaggacgacagcaggggtcttgtgcttcctgggtacaagtacctcggacccttcaacggactcgacaagggagagccggtcaacgaggcagacgccgcggccctcgagcacgacaaagcctacgaccggcagctcgacagcggagacaacccgtacctcaagtacaaccacgccgacgcggagtttcaggagcgccttaaagaagatacgtcttttgggggcaacctcggacgagcagtcttccaggcgaaaaagagggttcttgaacctctgggcctggttgaggaacctgttaagacggctccgggaaaaaagaggccggtagagcactctcctgtggagccagactcctcctcgggaaccggaaaggcgggccagcagcctgcaagaaaaagattgaattttggtcagactggagacgcagactcagtacctgacccccagcctctcggacagccaccagcagccccctctggtctgggaactaatacgatggctacaggcagtggcgcaccaatggcagacaataacgagggcgccgacggagtgggtaattcctcgggaaattggcattgcgattccacatggatgggcgacagagtcatcaccaccagcacccgaacctgggccctgcccacctacaacaaccacctctacaaacaaatttccagccaatcaggagcctcgaacgacaatcactactttggctacagcaccccttgggggtattttgacttcaacagattccactgccacttttcaccacgtgactggcaaagactcatcaacaacaactggggattccgacccaagagactcaacttcaagctctttaacattcaagtcaaagaggtcacgcagaatgacggtacgacgacgattgccaataaccttaccagcacggttcaggtgtttactgactcggagtaccagctcccgtacgtcctcggctcggcgcatcaaggatgcctcccgccgttcccagcagacgtcttcatggtgccacagtatggatacctcaccctgaacaacgggagtcaggcagtaggacgctcttcattttactgcctggagtactttccttctcagatgctgcgtaccggaaacaactttaccttcagctacacttttgaggacgttcctttccacagcagctacgctcacagccagagtctggaccgtctcatgaatcctctcatcgaccagtacctgtattacttgagcagaacaaacactccaagtggaaccaccacgcagtcaaggcttcagttttctcaggccggagcgagtgacattcgggaccagtctaggaactggcttcctggaccctgttaccgccagcagcgagtatcaaagacatctgcggataacaacaacagtgaatactcgtggactggagctaccaagtaccacctcaatggcagagactctctggtgaatccgggcccggccatggcaagccacaaggacgatgaagaaaagttttttcctcagagcggggttctcatctttgggaagcaaggctcagagaaaacaaatgtggacattgaaaaggtcatgattacagacgaagaggaaatcaggacaaccaatcccgtggctacggagcagtatggttctgtatctaccaacctccagagaggcaacagacaagcagctaccgcagatgtcaacacacaaggcgttcttccaggcatggtctggcaggacagagatgtgtaccttcaggggcccatctgggcaaagattccacacacggacggacattttcacccctctcccctcatgggtggattcggacttaaacaccctcctccacagattctcatcaagaacaccccggtacctgcgaatccttcgaccaccttcagtgcggcaaagtttgcttccttcatcacacagtactccgcgggacaggtcagcgtggagatcgagtgggagctgcagaaggaaaacagcaaacgctggaatcccgaaattcagtacacttccaactacaacaagtctgttaatgtggactttactgtggacactaatggcgtgtattcagagcctcgccccattggcaccagatacctgactcgtaatctgtaa

SEQ ID NO: 4330 - DNA, 2208 bp, Artificial Sequence
  source: /note="Description of Artificial Sequence: Synthetic polynucleotide"
atggctgccgatggttatcttccagattggctcgaggacactctctctgaaggaataagacagtggtggaagctcaaacctggcccaccaccaccaaagcccgcagagcggcataaggacgacagcaggggtcttgtgcttcctgggtacaagtacctcggacccttcaacggactcgacaagggagagccggtcaacgaggcagacgccgcggccctcgagcacgacaaagcctacgaccggcagctcgacagcggagacaacccgtacctcaagtacaaccacgccgacgcggagtttcaggagcgccttaaagaagatacgtcttttgggggcaacctcggacgagcagtcttccaggcgaaaaagagggttcttgaacctctgggcctggttgaggaacctgttaagacggctccgggaaaaaagaggccggtagagcactctcctgtggagccagactcctcctcgggaaccggaaaggcgggccagcagcctgcaagaaaaagattgaattttggtcagactggagacgcagactcagtacctgacccccagcctctcggacagccaccagcagccccctctggtctgggaactaatacgatggctacaggcagtggcgcaccaatggcagacaataacgagggcgccgacggagtgggtaattcctcgggaaattggcattgcgattccacatggatgggcgacagagtcatcaccaccagcacccgaacctgggccctgcccacctacaacaaccacctctacaaacaaatttccagccaatcaggagcctcgaacgacaatcactactttggctacagcaccccttgggggtattttgacttcaacagattccactgccacttttcaccacgtgactggcaaagactcatcaacaacaactggggattccgacccaagagactcaacttcaagctctttaacattcaagtcaaagaggtcacgcagaatgacggtacgacgacgattgccaataaccttaccagcacggttcaggtgtttactgactcggagtaccagctcccgtacgtcctcggctcggcgcatcaaggatgcctcccgccgttcccagcagacgtcttcatggtgccacagtatggatacctcaccctgaacaacgggagtcaggcagtaggacgctcttcattttactgcctggagtactttccttctcagatgctgcgtaccggaaacaactttaccttcagctacacttttgaggacgttcctttccacagcagctacgctcacagccagagtctggaccgtctcatgaatcctctcatcgaccagtacctgtattacttgagcagaacaaacactccaagtggaaccaccacgcagtcaaggcttcagttttctcaggccggagcgagtgacattcgggaccagtctaggaactggcttcctggaccctgttaccgccagcagcgagtatcaaagacatctgcggataacaacaacagtgaatactcgtggactggagctaccaagtaccacctcaatggcagagactctctggtgaatccgggcccggccatggcaagccacaaggacgatgaagaaaagttttttcctcagagcggggttctcatctttgggaagcaaggctcagagaaaacaaatgtggacattgaaaaggtcatgattacagacgaagaggaaatcaggacaaccaatcccgtggctacggagcagtatggttctgtatctaccaacctccagagaggcaacagacaagcagctaccgcagatgtcaacacacaaggcgttcttccaggcatggtctggcaggacagagatgtgtaccttcaggggcccatctgggcaaagattccacacacggacggacattttcacccctctcccctcatgggtggattcggacttaaacaccctcctccacagattctcatcaagaacaccccggtacctgcgaatccttcgaccaccttcagtgcggcaaagtttgcttccttcatcacacagtactccacgggacaggtcagcgtggagatcgagtgggagctgcagaaggaaaacagcaaacgctggaatcccgaaattcagtacacttccaactacaacaagtctgttaatgtggactttactgtggacactgatggcgtgtattcagagcctcgccccattggcaccagatacctgactcgtaatctgtaa

SEQ ID NO: 4331 - DNA, 2208 bp, Artificial Sequence
  source: /note="Description of Artificial Sequence: Synthetic polynucleotide"
atggctgccgatggttatcttccagattggctcgaggacactctctctgaaggaataagacagtggtggaagctcaaacctggcccaccaccaccaaagcccgcagagcggcataaggacgacagcaggggtcttgtgcttcctgggtacaagtacctcggacccttcaacggactcgacaagggagagccggtcaacgaggcagacgccgcggccctcgagcacgacaaagcctacgaccggcagctcgacagcggagacaacccgtacctcaagtacaaccacgccgacgcggagtttcaggagcgccttaaagaagatacgtcttttgggggcaacctcggacgagcagtcttccaggcgaaaaagagggttcttgaacctctgggcctggttgaggaacctgttaagacggctccgggaaaaaagaggccggtagagcactctcctgtggagccagactcctcctcgggaaccggaaaggcgggccagcagcctgcaagaaaaagattgaattttggtcagactggagacgcagactcagtacctgacccccagcctctcggacagccaccagcagccccctctggtctgggaactaatacgatggctacaggcagtggcgcaccaatggcagacaataacgagggcgccgacggagtgggtaattcctcgggaaattggcattgcgattccacatggatgggcgacagagtcatcaccaccagcacccgaacctgggccctgcccacctacaacaaccacctctacaaacaaatttccagccaatcaggagcctcgaacgacaatcactactttggctacagcaccccttgggggtattttgacttcaacagattccactgccacttttcaccacgtgactggcaaagactcatcaacaacaactggggattccgacccaagagactcaacttcaagctctttaacattcaagtcaaagaggtcacgcagaatgacggtacgacgacgattgccaataaccttaccagcacggttcaggtgtttactgactcggagtaccagctcccgtacgtcctcggctcggcgcatcaaggatgcctcccgccgttcccagcagacgtcttcatggtgccacagtatggatacctcaccctgaacaacgggagtcaggcagtaggacgctcttcattttactgcctggagtactttccttctcagatgctgcgtaccggaaacaactttaccttcagctacacttttgaggacgttcctttccacagcagctacgctcacagccagagtctggaccgtctcatgaatcctctcatcgaccagtacctgtattacttgagcagaacaaacactccaagtggaaccaccacgcagtcaaggcttcagttttctcaggccggagcgagtgacattcgggaccagtctaggaactggcttcctggaccctgttaccgccagcagcgagtatcaaagacatctgcggataacaacaacagtgaatactcgtggactggagctaccaagtaccacctcaatggcagagactctctggtgaatccgggcccggccatggcaagccacaaggacgatgaagaaaagttttttcctcagagcggggttctcatctttgggaagcaaggctcagagaaaacaaatgtggacattgaaaaggtcatgattacagacgaagaggaaatcaggacaaccaatcccgtggctacggagcagtatggttctgtatctaccaacctccagagaggcaacagacaagcagctaccgcagatgtcaacacacaaggcgttcttccaggcatggtctggcagggcagagatgtgtaccttcaggggcccatctgggcaaagattccacacacggacggacattttcacccctctcccctcatgggtggattcggacttaaacaccctcctccacagattctcatcaagaacaccccggtacctgcgaatccttcgaccaccttcagtgcggcaaagtttgcttccttcatcacacagtactccacgggacaggtcagcgtggagatcgagtgggagctgcagaaggaaaacagcaaacgctggaatcccgaaattcagtacacttccaactacaacaagtctgttaatgtggactttactgtggacactaatggcgtgtattcagagcctcgccccattggcaccagatacctgactcgtaatctgtaa

SEQ ID NO: 4332 - DNA, 2208 bp, Artificial Sequence
  source: /note="Description of Artificial Sequence: Synthetic polynucleotide"
atggctgccgatggttatcttccagattggctcgaggacactctctctgaaggaataagacagtggtggaagctcaaacctggcccaccaccaccaaagcccgcagagcggcataaggacgacagcaggggtcttgtgcttcctgggtacaagtacctcggacccttcaacggactcgacaagggagagccggtcaacgaggcagacgccgcggccctcgagcacgacaaagcctacgaccggcagctcgacagcggagacaacccgtacctcaagtacaaccacgccgacgcggagtttcaggagcgccttaaagaagatacgtcttttgggggcaacctcggacgagcagtcttccaggcgaaaaagagggttcttgaacctctgggcctggttgaggaacctgttaagacggctccgggaaaaaaggggccggtagagcactctcctgtggagccagactcctcctcgggaaccggaaaggcgggccagcagcctgcaagaaaaagattgaattttggtcagactggagacgcagactcagtacctgacccccagcctctcggacagccaccagcagccccctctggtctgggaactaatacgatggctacaggcagtggcgcaccaatggcagacaataacgagggcgccgacggagtgggtaattcctcgggaaattggcattgcgattccacatggatgggcgacagagtcatcaccaccagcacccgaacctgggccctgcccacctacaacaaccacctctacaaacaaatttccagccaatcaggagcctcgaacgacaatcactactttggctacagcaccccttgggggtattttgacttcaacagattccactgccacttttcaccacgtgactggcaaagactcatcaacaacaactggggattccgacccaagagactcaacttcaagctctttaacattcaagtcaaagaggtcacgcagaatgacggtacgacgacgattgccaataaccttaccagcacggttcaggtgtttactgactcggagtaccagctcccgtacgtcctcggctcggcgcatcaaggatgcctcccgccgttcccagcagacgtcttcatggtgccacagtatggatacctcaccctgaacaacgggagtcaggcagtaggacgctcttcattttactgcctggagtactttccttctcagatgctgcgtaccggaaacaactttaccttcagctacacttttgaggacgttcctttccacagcagctacgctcacagccagagtctggaccgtctcatgaatcctctcatcgaccagtacctgtattacttgagcagaacaaacactccaagtggaaccaccacgcagtcaaggcttcagttttctcaggccggagcgagtgacattcgggaccagtctaggaactggcttcctggaccctgttaccgccagcagcgagtatcaaagacatctgcggataacaacaacagtgaatactcgtggactggagctaccaagtaccacctcaatggcagagactctctggtgaatccgggcccggccatggcaggccacaaggacgatgaagaaaagttttttcctcagagcggggttctcatctttgggaagcaaggctcagagaaaacaaatgtggacattgaaaaggtcatgattacagacgaagaggaaatcaggacaaccaatcccgtggctacggagcagtatggttctgtatctaccaacctccagagaggcaacagacaagcagctaccgcagatgtcaacacacaaggcgttcttccaggcatggtctggcaggacagagatgtgtaccttcaggggcccatctgggcaaagattccacacacggacggacattttcacccctctcccctcatgggtggattcggacttaaacaccctcctccacagattctcatcaagaacaccccggtacctgcgaatccttcgaccaccttcagtgcggcaaagtttgcttccttcatcacacagtactccacgggacaggtcagcgtggagatcgagtgggagctgcagaaggaaaacagcaaacgctggaatcccgaaattcagtacacttccaactacaacaagtctgttaatgtggactttactgtggacactaatggcgtgtattcagagcctcgccccattggcaccagatacctgactcgtaatctgtaa

SEQ ID NO: 4333 - DNA, 2208 bp, Artificial Sequence
  source: /note="Description of Artificial Sequence: Synthetic polynucleotide"
atggctgccgatggttatcttccagattggctcgaggacactctctctgaaggaataagacagtggtggaagctcaaacctggcccaccaccaccaaagcccgcagagcggcataaggacgacagcaggggtcttgtgcttcctgggtacaagtacctcggacccttcaacggactcgacaagggagagccggtcaacgaggcagacgccgcggccctcgagcacgacaaagcctacgaccggcagctcgacagcggagacaacccgtacctcaagtacaaccacgccgacgcggagtttcaggagcgccttaaagaagatacgtcttttgggggcaacctcggacgagcagtcttccaggcgaaaaagagggttcttgaacctctgggcctggttgaggaacctgttaagacggctccgggaaaaaagaggctggtagagcactctcctgtggagccagactcctcctcgggaaccggaaaggcgggccagcagcctgcaagaaaaagattgaattttggtcagactggagacgcagactcagtacctgacccccagcctctcggacagccaccagcagccccctctggtctgggaactaatacgatggctacaggcagtggcgcaccaatggcagacaataacgagggcgccgacggagtgggtaattcctcgggaaattggcattgcgattccacatggatgggcgacagagtcatcaccaccagcacccgaacctgggccctgcccacctacaacaaccacctctacaaacaaatttccagccaatcaggagcctcgaacgacaatcactactttggctacagcaccccttgggggtattttgacttcaacagattccactgccacttttcaccacgtgactggcaaagactcatcaacaacaactggggattccgacccaagagactcaacttcaagctctttaacattcaagtcaaagaggtcacgcagaatgacggtacgacgacgattgccaataaccttaccagcacggttcaggtgtttactgactcggagtaccagctcccgtacgtcctcggctcggcgcatcaaggatgcctcccgccgttcccagcagacgtcttcatggtgccacagtatggatacctcaccctgaacaacgggagtcaggcagtaggacgctcttcattttactgcctggagtactttccttctcagatgctgcgtaccggaaacaactttaccttcagctacacttttgaggacgttcctttccacagcagctacgctcacagccagagtctggaccgtctcatgaatcctctcatcgaccagtacctgtattacttgagcagaacaaacactccaagtggaaccaccacgcagtcaaggcttcagttttctcaggccggagcgagtgacattcgggaccagtctaggaactggcttcctggaccctgttaccgccagcagcgagtatcaaagacatctgcggataacaacaacagtgaatactcgtggactggagctaccaagtaccacctcaatggcagagactctctggtgaatccgggcccggccatggcaagccacaaggacgatgaagaaaagttttttcctcagagcggggttctcatctttgggaagcaaggctcagagaaaacaaatgtggacattgaaaaggtcatgattacagacgaagaggaaatcaggacaaccaatcccgtggctacggagcagtatggttctgtatctaccaacctccagagaggcaacagacaagcagctaccgcagatgtcaacacacaaggcgttcttccaggcatggtctggcaggacagagatgtgtaccttcaggggcccatctgggcaaagattccacacacggacggacattttcacccctctcccctcatgggtggattcggacttaaacaccctcctccacagattctcatcaagaacaccccggtacctgcgaatccttcgaccaccttcagtgcggcaaagtttgcttccttcatcacacagtactccacgggacaggtcagcgtggagatcgagtgggagctgcagaaggaaaacagcaaacgctggaatcccgaaattcagtacacttccaactacaacaagtctgttaatgtggactttactgtggacactaatggcgtgtattcagagcctcgccccattggcaccagatacctgactcgtaatctgtaa

SEQ ID NO: 4334 - DNA, 2208 bp, Artificial Sequence
  source: /note="Description of Artificial Sequence: Synthetic polynucleotide"
atggctgccgatggttatcttccagattggctcgaggacactctctctgaaggaataagacagtggtggaagctcaaacctggcccaccaccaccaaagcccgcagagcggcataaggacgacagcaggggtcttgtgcttcctgggtacaagtacctcggacccttcaacggactcgacaagggagagccggtcaacgaggcaggcgccgcggccctcaagcacgacaaagcctacgaccggcagctcgacagcggagacaacccgtacctcaagtacaaccacgccgacgcggagtttcaggagcgccttaaagaagatacgtcttttgggggcaacctcggacgagcagtcttccaggcgaaaaagagggttcttgaacctctgggcctggttgaggaacctgttaagacggctccgggaaaaaagaggccggtagagcactctcctgtggagccagactcctcctcgggaaccggaaaggcgggccagcagcctgcaagaaaaagattgaattttggtcagactggagacgcagactcagtacctgacccccagcctctcggacagccaccagcagccccctctggtctgggaactaatacgatggctacaggcagtggcgcaccaatggcagacaataacgagggcgccgacggagtgggtaattcctcgggaaattggcattgcgattccacatggatgggcgacagagtcatcaccaccagcacccgaacctgggccctgcccacctacaacaaccacctctacaaacaaatttccagccaatcaggagcctcgaacgacaatcactactttggctacagcaccccttgggggtattttgacttcaacagattccactgccacttttcaccacgtgactggcaaagactcatcaacaacaactggggattccgacccaagagactcaacttcaagctctttaacattcaagtcaaagaggtcacgcagaatgacggtacgacgacgattgccaataaccttaccagcacggttcaggtgtttactgactcggagtaccagctcccgtacgtcctcggctcggcgcatcaaggatgcctcccgccgttcccagcagacgtcttcatggtgccacagtatggatacctcaccctgaacaacgggagtcaggcagtaggacgctcttcattttactgcctggagtactttccttctcagatgctgcgtaccggaaacaactttaccttcagctacacttttgaggacgttcctttccacagcagctacgctcacagccagagtctggaccgtctcatgaatcctctcatcgaccagtacctgtattacttgagcagaacaaacactccaagtggaaccaccacgcagtcaaggcttcagttttctcaggccggagcgagtgacattcgggaccagtctaggaactggcttcctggaccctgttaccgccagcagcgagtatcaaagacatctgcggataacaacaacagtgaatactcgtggactggagctaccaagtaccacctcaatggcagagactctctggtgaatccgggcccggccatggcaagccacaaggacgatgaagaaaagttttttcctcagagcggggttctcatctttgggaagcaaggctcagagaaaacaaatgtggacattgaaaaggtcatgattacagacgaagaggaaatcaggacaaccaatcccgtggctacggagcagtatggttctgtatctaccaacctccagagaggcaacagacaagcagctaccgcagatgtcaacacacaaggcgttcttccaggcatggtctggcaggacagagatgtgtaccttcaggggcccatctgggcaaagattccacacacggacggacattttcacccctctcccctcatgggtggattcggacttaaacaccctcctccacagattctcatcaagaacaccccggtacctgcgaatccttcgaccaccttcagtgcggcaaagtttgcttccttcatcacacagtactccacgggacaggtcagcgtggagatcgagtgggagctgcagaaggaaaacagcaaacgctggaatcccgaaattcagtacacttccaactacaacaagtctgttaatgtggactttactgtggacactaatggcgtgtattcagagcctcgccccattggcaccagatacctgactcgtaatctgtaa

SEQ ID NO: 4335 - DNA, 2208 bp, Artificial Sequence
  source: /note="Description of Artificial Sequence: Synthetic polynucleotide"
atggctgccgatggttatcttccagattggctcgaggacactctctctgaaggaataagacagtggtggaagctcaaacctggcccaccaccaccaaagcccgcagagcggcataaggacgacagcaggggtcttgtgcttcctgggtacaagtacctcggacccttcaacggactcgacaagggagagccggtcaacgaggcagacgccgcggccctcgagcacgacaaagcctacgaccggcagctcgacagcggagacaacccgtacctcaagtacaaccacgccgacgcggagtttcaggagcgccttaaagaagatacgtcttttgggggcaacctcggacgagcagtcttccaggcgaaaaagagggttcttgaacctctgggcctggttgaggaacctgttaagacggctccgggaaaaaagaggccggtagagcactctcctgtggagccagactcctcctcgggaaccggaaaggcgggccagcagcctgcaagaaaaagattgaattttggtcagactggagacgcagactcagtacctgacccccagcctctcggacagccaccagcagccccctctggtctgggaactaatacgatggctacaggcagtggcgcaccaatggcagacaataacgagggcgccgacggagtgggtaattcctcgggaaattggcattgcgattccacatggatgggcgacagagtcatcaccaccagcacccgaacctgggccctgcccacctacaacaaccacctctacaaacaaatttccagccaatcaggagcctcgaacgacaatcactactttggctacagcaccccttgggggtattttgacttcaacagattccactgccacttttcaccacgtgactggcaaagactcatcaacaacaactggggattccgacccaagagactcaacttcaagctctttaacattcaagtcaaagaggtcacgcagaatgacggtacgacgacgattgccaataaccttaccagcacggttcaggtgtttactgactcggagtaccagctcccgtacgtcctcggctcggcgcatcaaggatgcctcccgccgttcccagcagacgtcttcatggtgccacagtatggatacctcaccctgaacaacgggagtcaggcagtaggacgctcttcattttactgcctggagtactttccttctcagatgctgcgtaccggaaacaactttaccttcagctacacttttgaggacgttcctttccacagcagctacgctcacagccagagtctggaccgtctcatgaatcctctcatcgaccagtacctgtattacttgagcagaacaaacactccaagtggaaccaccacgcagtcaaggcttcagttttctcaggccggagcgagtggcattcgggaccagtctaggaactggcttcctggaccctgttaccgccagcagcgagtatcaaagacatctgcggataacaacaacagtgaatactcgtggactggagctaccaagtaccacctcaatggcagagactctctggtgaatccgggcccggccatggcaagccacaaggacgatgaagaaaagttttttcctcagagcggggttctcatctttgggaagcaaggctcagagaaaacaaatgtggacattgaaaaggtcatgattacagacgaagaggaaatcaggacaaccaatcccgtggctacggagcagtatggttctgtatctaccaacctccagagaggcaacagacaagcagctaccgcagatgtcaacacacaaggcgttcttccaggcatggtctggcaggacagagatgtgtaccttcaggggcccatctgggcaaagattccacacacggacggacattttcacccctctcccctcatgggtggattcggacttaaacaccctcctccacagattctcatcaagaacaccccggtacctgcgaatccttcgaccaccttcagtgcggcaaagtttgcttccttcatcacacagtactccacgggacaggtcagcgtggagatcgagtgggagctgcagaaggaaaacagcaaacgctggaatcccgaaattcagtacacttccaactacaacaagtctgttaatgtggactttactgtggacactaatggcgtgtattcagagcctcgccccattggcaccagatacctgactcgtaatctgtaa

SEQ ID NO: 4336 - DNA, 2208 bp, Artificial Sequence
  source: /note="Description of Artificial Sequence: Synthetic polynucleotide"
atggctgccgatggttatcttccagattggctcgaggacactctctctgaaggaataagacagtggtggaagctcaaacctggcccaccaccaccaaagcccgcagagcggcataaggacgacagcaggggtcttgtgcttcctgggtacaagtacctcggacccttcaacggactcgacaagggagagccggtcaacgaggcagacgccgcggccctcgagcacgacaaagcctacgaccggcagctcgacagcggagacaacccgtacctcaagtacaaccacgccgacgcggagtttcaggagcgccttaaagaagatacgtcttttgggggcaacctcggacgagcagtcttccaggcgaaaaagagggttcttgaacctctgggcctggttgaggaacctgttaagacggctccgggaaaaaagaggccggtagagcactctcctgtggagccagactcctcctcgggaaccggaaaggcgggccagcagcctgcaagaaaaagattgaattttggtcagactggagacgcagactcagtacctgacccccagcctctcggacagccaccagcagccccctctggtctgggaactaatacgatggctacaggcagtggcgcaccaatggcagacaataacgagggcgccgacggagtgggtaattcctcgggaaattggcattgcgattccacatggatgggcgacagagtcatcaccaccagcacccgaacctgggccctgcccacctacaacaaccacctctacaaacaaatttccagccaatcaggagcctcgaacgacaatcactactttggctacagcaccccttgggggtattttgacttcaacagattccactgccacttttcaccacgtgactggcaaagactcatcaacaacaactggggattccgacccaagagactcaacttcaagctctttaacattcaagtcaaagaggtcacgcagaatgacggtacgacgacgattgccaataaccttaccagcacggttcaggtgtttactgactcggagtaccagctcccgtacgtcctcggctcggcgcatcaaggatgcctcccgccgttcccagcagacgtcttcatggtgccacagtatggatacctcaccctgaacaacgggagtcaggcagtaggacgctcttcattttactgcctggagtactttccttctcagatgctgcgtaccggaaacaactttaccttcagctacacttttgaggacgttcctttccacagcagctacgctcacagccagagtctggaccgtctcatgaatcctctcatcgaccagtacctgtattacttgagcagagcaaacactccaagtggaaccaccacgcagtcaaggcttcagttttctcaggccggagcgagtgacattcgggaccagtctaggaactggcttcctggaccctgttaccgccagcagcgagtatcaaagacatctgcggataacaacaacagtgaatactcgtggactggagctaccaagtaccacctcaatggcagagactctctggtgaatccgggcccggccatggcaagccacaaggacgatgaagaaaagttttttcctcagagcggggttctcatctttgggaagcaaggctcagagaaaacaaatgtggacattgaaaaggtcatgattacagacgaagaggaaatcaggacaaccaatcccgtggctacggagcagtatggttctgtatctaccaacctccagagaggcaacagacaagcagctaccgcagatgtcaacacacaaggcgttcttccaggcatggtctggcaggacagagatgtgtaccttcaggggcccatctgggcaaagattccacacacggacggacattttcacccctctcccctcatgggtggattcggacttaaacaccctcctccacagattctcatcaagaacaccccggtacctgcgaatccttcgaccaccttcagtgcggcaaagtttgcttccttcatcacacagtactccacgggacaggtcagcgtggagatcgagtgggagctgcagaaggaaaacagcaaacgctggaatcccgaaattcagtacacttccaactacaacaagtctgttaatgtggactttactgtggacactaatggcgtgtattcagagcctcgccccattggcaccagatacctgactcgtaatctgtaa

SEQ ID NO: 4337 - DNA, 2208 bp, Artificial Sequence
  source: /note="Description of Artificial Sequence: Synthetic polynucleotide"
atggctgccgatggttatcttccagattggctcgaggacactctctctgaaggaataagacagtggtggaagctcaaacctggcccaccaccaccaaagcccgcagagcggcataaggacgacagcaggggtcttgtgcttcctgggtacaagtacctcggacccttcaacggactcgacaagggagagccggtcaacgaggcagacgccgcggccctcgagcacgacaaagcctacgaccggcagctcgacagcggagacaacccgtacctcaagtacaaccacgccgacgcggagtttcaggagcgccttaaagaagatacgtcttttgggggcaacctcggacgagcagtcttccaggcgaaaaagagggttcttgaacctctgggcctggttgaggaacctgttaagacggctccgggaaaaaagaggccggtagagcactctcctgtggagccagactcctcctcgggaaccggaaaggcgggccagcagcctgcaagaaaaagattgaattttggtcagactggagacgcagactcagtacctgacccccagcctctcggacagccaccagcagccccctctggtctgggaactaatacgatggctacaggcagtggcgcaccaatggcagacaataacgagggcgccgacggagtgggtaattcctcgggaaattggcattgcgattccacatggatgggcgacagagtcatcaccaccagcacccgaacccgggccctgcccacctacaacaaccacctctacaaacaaatttccagccaatcaggagcctcgaacgacaatcactactttggctacagcaccccttgggggtattttgacttcaacagattccactgccacttttcaccacgtgactggcaaagactcatcaacaacaactggggattccgacccaagagactcaacttcaagctctttaacattcaagtcaaagaggtcacgcagaatgacggtacgacgacgattgccaataaccttaccagcacggttcaggtgtttactgactcggagtaccagctcccgtacgtcctcggctcggcgcatcaaggatgcctcccgccgttcccagcagacgtcttcatggtgccacagtatggatacctcaccctgaacaacgggagtcaggcagtaggacgctcttcattttactgcctggagtactttccttctcagatgctgcgtaccggaaacaactttaccttcagctacacttttgaggacgttcctttccacagcagctacgctcacagccagagtctggaccgtctcatgaatcctctcatcgaccagtacctgtattacttgagcagaacaaacactccaagtggaaccaccacgcagtcaaggcttcagttttctcaggccggagcgagtgacattcgggaccagtctaggaactggcttcctggaccctgttaccgccagcagcgagtatcaaagacatctgcggataacaacaacagtgaatactcgtggactggagctaccaagtaccacctcaatggcagagactctctggtgaatccgggcccggccatggcaagccacaaggacgatgaagaaaagttttttcctcagagcggggttctcatctttgggaagcaaggctcagagaaaacaaatgtggacattgaaaaggtcatgattacagacgaagaggaaatcaggacaaccaatcccgtggctacggagcagtatggttctgtatctaccaacctccagagaggcaacagacaagcagctaccgcagatgtcaacacacaaggcgttcttccaggcatggtctggcaggacagagatgtgtaccttcaggggcccatctgggcaaagattccacacacggacggacattttcacccctctcccctcatgggtggattcggacttaaacaccctcctccacagattctcatcaagaacaccccggtacctgcgaatccttcgaccaccttcagtgcggcaaagtttgcttccttcatcacacagtactccacgggacaggtcagcgtggagatcgagtgggagctgcagaaggaaaacagcaaacgctggaatcccgaaattcagtacacttccaactacaacaagtctgttaatgtggactttactgtggacactaatggcgtgtattcagagcctcgccccattggcaccagatacctgactcgtaatctgtaa

SEQ ID NO: 4338 - DNA, 2208 bp, Artificial Sequence
  source: /note="Description of Artificial Sequence: Synthetic polynucleotide"
atggctgccgatggttatcttccagattggctcgaggacactctctctgaaggaataagacagtggtggaagctcaaacctggcccaccaccaccaaagcccgcagagcggcataaggacgacagcaggggtcttgtgcttcctgggtacaagtacctcggacccttcaacggactcgacaagggagagccggtcaacgaggcagacgccgcggccctcgagcacgacaaagcctacgaccggcagctcgacagcggagacaacccgtacctcaagtacaaccacgccgacgcggagtttcaggagcgccttaaagaagatacgtcttttgggggcaacctcggacgagcagtcttccaggcgaaaaagagggttcttgaacctctgggcctggttgaggaacctgttaagacggctccgggaaaaaagaggccggtagagcactctcctgtggagccagactcctcctcgggaaccggaaaggcgggccagcagcctgcaagaaaaagattgaattttggtcagactggagacgcagactcagtacctgacccccagcctctcggacagccaccagcagccccctctggtctgggaactaatacgatggctacaggcagtggcgcaccaatggcagacaataacgagggcgccgacggagtgggtaattcctcgggaaattggcattgcgattccacatggatgggcgacagagtcatcaccaccagcacccgaacctgggccctgcccacctacaacagccacctctacaaacaaatttccagccaatcaggagcctcgaacgacaatcactactttggctacagcaccccttgggggtattttgacttcaacagattccactgccacttttcaccacgtgactggcaaagactcatcaacaacaactggggattccgacccaagagactcaacttcaagctctttaacattcaagtcaaagaggtcacgcagaatgacggtacgacgacgattgccaataaccttaccagcacggttcaggtgtttactgactcggagtaccagctcccgtacgtcctcggctcggcgcatcaaggatgcctcccgccgttcccagcagacgtcttcatggtgccacagtatggatacctcaccctgaacaacgggagtcaggcagtaggacgctcttcattttactgcctggagtactttccttctcagatgctgcgtaccggaaacaactttaccttcagctacacttttgaggacgttcctttccacagcagctacgctcacagccagagtctggaccgtctcatgaatcctctcatcgaccagtacctgtattacttgagcagaacaaacactccaagtggaaccaccacgcagtcaaggcttcagttttctcaggccggagcgagtgacattcgggaccagtctaggaactggcttcctggaccctgttaccgccagcagcgagtatcaaagacatctgcggataacaacaacagtgaatactcgtggactggagctaccaagtaccacctcaatggcagagactctctggtgaatccgggcccggccatggcaagccacaaggacgatgaagaaaagttttttcctcagagcggggttctcatctttgggaagcaaggctcagagaaaacaaatgtggacattgaaaaggtcatgattacagacgaagaggaaatcaggacaaccaatcccgtggctacggagcagtatggttctgtatctaccaacctccagagaggcaacagacaagcagctaccgcagatgtcaacacacaaggcgttcttccaggcatggtctggcaggacagagatgtgtaccttcaggggcccatctgggcaaagattccacacacggacggacattttcacccctctcccctcatgggtggattcggacttaaacaccctcctccacagattctcatcaagaacaccccggtacctgcgaatccttcgaccaccttcagtgcggcaaagtttgcttccttcatcacacagtactccacgggacaggtcagcgtggagatcgagtgggagctgcagaaggaaaacagcaaacgctggaatcccgaaattcagtacacttccaactacaacaagtctgttaatgtggactttactgtggacactaatggcgtgtattcagagcctcgccccattggcaccagatacctgactcgtaatctgtaa

SEQ ID NO: 4339 - DNA, 2208 bp, Artificial Sequence
  source: /note="Description of Artificial Sequence: Synthetic polynucleotide"
atggctgccgatggttatcttccagattggctcgaggacactctctctgaaggaataagacagtggtggaagctcaaacctggcccaccaccaccaaagcccgcagagcggcataaggacgacagcaggggtcttgtgcttcctgggtacaagtacctcggacccttcaacggactcgacaagggagagccggtcaacgaggcagacgccgcggccctcgagcacgacaaagcctacgaccggcagctcgacagcggagacaacccgtacctcaagtacaaccacgccgacgcggagtttcaggagcgccttaaagaagatacgtcttttgggggcaacctcggacgagcagtcttccaggcgaaaaagagggttcttgaacctctgggcctggttgaggaacctgttaagacggctccgggaaaaaagaggccggtagagcactctcctgtggagccagactcctcctcgggaaccggaaaggcgggccagcagcctgcaagaaaaagattgaattttggtcagactggagacgcagactcagtacctgacccccagcctctcggacagccaccagcagccccctctggtctgggaactaatacgatggctacaggcagtggcgcaccaatggcagacaataacgagggcgccgacggagtgggtaattcctcgggaaattggcattgcgattccacatggatgggcgacagagtcatcaccaccagcacccgaacctgggccctgcccacctacaacaaccacctctacaaacaaatttccagccaatcaggagcctcgaacgacaatcactactttggctacagcaccccttgggggtattttgacttcaacagattccactgccacttttcaccacgtgactggcaaagactcatcaacaacaactggggattccgacccaagagactcaacttcaagctctttaacattcaagtcaaagaggtcacgcagaatgacggtacgacgacgattgccaataaccttaccagcacggttcaggtgtttactgactcggagtaccagctcccgtacgtcctcggctcggcgcatcaaggatgcctcccgccgttcccagcagacgtcttcatggtgccacagtatggatacctcaccctgaacaacgggagtcaggcagtaggacgctcttcattttactgcctggagtactttccttctcagatgctgcgtaccggaaacaactttaccttcagctacacttttgaggacgttcctttccacagcagctacgctcacagccagagtctggaccgtctcatgaatcctctcatcgaccagtacctgtattacttgagcagaacaaacactccaagtggaaccaccacgcagtcaaggcttcagttttctcaggccggagcgagtgacattcgggaccagtctaggaactggcttcctggaccctgttaccgccagcagcgagtatcaaagacatctgcggataacaacaacagtgaatactcgtggactggagctaccaagtaccacctcaatggcagagactctctggtgaatccgggcccggccatggcaagccacaaggacgatgaagaaaagttttttcctcagagcggggttctcatctttgggaagcaaggctcagagaaaacaaatgtggacattgaaaaggtcatgattacagacgaagaggaaatcaggacaaccaatcccgtggctacggagcagtatggttctgtatctaccaacctccagagaggcaacagacaagcagctaccgcagatgtcaacacacaaggcgttcttccaggcatggtctggcaggacagagatgtgtaccttcaggggcccatctgggcaaagattccacacacggacggacattttcacccctctcccctcatgggtggattcggacttaaacgccctcctccacagattctcatcaagaacaccccggtacctgcgaatccttcgaccaccttcagtgcggcaaagtttgcttccttcatcacacagtactccacgggacaggtcagcgtggagatcgagtgggagctgcagaaggaaaacagcaaacgctggaatcccgaaattcagtacacttccaactacaacaagtctgttaatgtggactttactgtggacactaatggcgtgtattcagagcctcgccccattggcaccagatacctgactcgtaatctgtaa

SEQ ID NO: 4340 - DNA, 2208 bp, Artificial Sequence
  source: /note="Description of Artificial Sequence: Synthetic polynucleotide"
atggctgccgatggttatcttccagattggctcgaggacactctctctgaaggaataagacagtggtggaagctcaaacctggcccaccaccaccaaagcccgcagagcggcataaggacgacagcaggggtcttgtgcttcctgggtacaagtacctcggacccttcaacggactcgacaagggagagccggtcaacgaggcagacgccgcggccctcgagcacgacaaagcctacgaccggcagctcgacagcggagacaacccgtacctcaagtacaaccacgccgacgcggagtttcaggagcgccttaaagaagatacgtcttttgggggcaacctcggacgagcagtcttccaggcgaaaaagagggttcttgaacctctgggcctggttgaggaacctgttaagacggctccgggaaaaaagaggccggtagagcactctcctgtggagccagactcctcctcgggaaccggaaaggcgggccagcagcctgcaagaaaaagattgaattttggtcagactggagacgcagactcagtacctgacccccagcctctcggacagccaccagcagccccctctggtctgggaactaatacgatggctacaggcagtggcgcaccaatggcagacaataacgagggcgccgacggagtgggtaattcctcgggaaattggcattgcgattccacatggatgggcgacagagtcatcaccaccagcacccgaacctgggccctgcccacctacaacaaccacctctacaaacaaatttccagccaatcaggagcctcgaacgacaatcactactttggctacagcaccccttgggggtattttgacttcaacagattccactgccacttttcaccacgtgactggcaaagactcatcaacaacaactggggattccgacccaagagactcaacttcaagctctttaacattcaagtcaaagaggtcacgcagaatgacggtacgacgacgattgccaataaccttaccagcacggttcaggtgtttactgactcggagtaccggctcccgtacgtcctcggctcggcgcatcaaggatgcctcccgccgttcccagcagacgtcttcatggtgccacagtatggatacctcaccctgaacaacgggagtcaggcagtaggacgctcttcattttactgcctggagtactttccttctcagatgctgcgtaccggaaacaactttaccttcagctacacttttgaggacgttcctttccacagcagctacgctcacagccagagtctggaccgtctcatgaatcctctcatcgaccagtacctgtattacttgagcagaacaaacactccaagtggaaccaccacgcagtcaaggcttcagttttctcaggccggagcgagtgacattcgggaccagtctaggaactggcttcctggaccctgttaccgccagcagcgagtatcaaagacatctgcggataacaacaacagtgaatactcgtggactggagctaccaagtaccacctcaatggcagagactctctggtgaatccgggcccggccatggcaagccacaaggacgatgaagaaaagttttttcctcagagcggggttctcatctttgggaagcaaggctcagagaaaacaaatgtggacattgaaaaggtcatgattacagacgaagaggaaatcaggacaaccaatcccgtggctacggagcagtatggttctgtatctaccaacctccagagaggcaacagacaagcagctaccgcagatgtcaacacacaaggcgttcttccaggcatggtctggcaggacagagatgtgtaccttcaggggcccatctgggcaaagattccacacacggacggacattttcacccctctcccctcatgggtggattcggacttaaacaccctcctccacagattctcatcaagaacaccccggtacctgcgaatccttcgaccaccttcagtgcggcaaagtttgcttccttcatcacacagtactccacgggacaggtcagcgtggagatcgagtgggagctgcagaaggaaaacagcaaacgctggaatcccgaaattcagtacacttccaactacaacaagtctgttaatgtggactttactgtggacactaatggcgtgtattcagagcctcgccccattggcaccagatacctgactcgtaatctgtaa

SEQ ID NO: 4341 - DNA, 2208 bp, Artificial Sequence
  source: /note="Description of Artificial Sequence: Synthetic polynucleotide"
atggctgccgatggttatcttccagattggctcgaggacactctctctgaaggaataagacagtggtggaagctcaaacctggcccaccaccaccaaagcccgcagagcggcataaggacgacagcaggggtcttgtgcttcctgggtacaagtacctcggacccttcaacggactcgacaagggagagccggtcaacgaggcagacgccgcggccctcgagcacgacaaagcctacgaccggcagctcgacagcggagacaacccgtacctcaagtacaaccacgccgacgcggagtttcaggagcgccttaaagaagatacgtcttttgggggcaacctcggacgagcagtcttccaggcgaaaaagagggttcttgaacctctgggcctggttgaggaacctgttaagacggctccgggaaaaaagaggccggtagagcactctcctgtggagccagactcctcctcgggaaccggaaaggcgggccagcagcctgcaagaaaaagattgaattttggtcagactggagacgcagactcagtacctgacccccagcctctcggacagccaccagcagccccctctggtctgggaactaatacgatggctacaggcagtggcgcaccaatggcagacaataacgagggcgccgacggagtgggtaattcctcgggaaattggcattgcgattccacatggatgggcgacagagtcatcaccaccagcacccgaacctgggccctgcccacctacaacaaccacctctacaaacaaatttccagccaatcaggagcctcgaacgacaatcactactttggctacagcaccccttgggggtattttgacttcaacagattccactgccacttttcaccacgtgactggcaaagactcatcaacaacaactggggattccgacccaagagactcaacttcaagctctttaacattcaagtcaaagaggtcacgcagaatgacggtacgacgacgattgccaataaccttaccagcacggttcgggtgtttactgactcggagtaccagctcccgtacgtcctcggctcggcgcatcaaggatgcctcccgccgttcccagcagacgtcttcatggtgccacagtatggatacctcaccctgaacaacgggagtcaggcagtaggacgctcttcattttactgcctggagtactttccttctcagatgctgcgtaccggaaacaactttaccttcagctacacttttgaggacgttcctttccacagcagctacgctcacagccagagtctggaccgtctcatgaatcctctcatcgaccagtacctgtattacttgagcagaacaaacactccaagtggaaccaccacgcagtcaaggcttcagttttctcaggccggagcgagtgacattcgggaccagtctaggaactggcttcctggaccctgttaccgccagcagcgagtatcaaagacatctgcggataacaacaacagtgaatactcgtggactggagctaccaagtaccacctcaatggcagagactctctggtgaatccgggcccggccatggcaagccacaaggacgatgaagaaaagttttttcctcagagcggggttctcatctttgggaagcaaggctcagagaaaacaaatgtggacattgaaaaggtcatgattacagacgaagaggaaatcaggacaaccaatcccgtggctacggagcagtatggttctgtatctaccaacctccagagaggcaacagacaagcagctaccgcagatgtcaacacacaaggcgttcttccaggcatggtctggcaggacagagatgtgtaccttcaggggcccatctgggcaaagattccacacacggacggacattttcacccctctcccctcatgggtggattcggacttaaacaccctcctccacagattctcatcaagaacaccccggtacctgcgaatccttcgaccaccttcagtgcggcaaagtttgcttccttcatcacacagtactccacgggacaggtcagcgtggagatcgagtgggagctgcagaaggaaaacagcaaacgctggaatcccgaaattcagtacacttccaactacaacaagtctgttaatgtggactttactgtggacactaatggcgtgtattcagagcctcgccccattggcaccagatacctgactcgtaatctgtaa

SEQ ID NO: 4342 - DNA, 2208 bp, Artificial Sequence
  source: /note="Description of Artificial Sequence: Synthetic polynucleotide"
atggctgccgatggttatcttccagattggctcgaggacactctctctgaaggaataagacagtggtggaagctcaaacctggcccaccaccaccaaagcccgcagagcggcatagggacgacagcaggggtcttgtgcttcctgggtacaagtacctcggacccttcaacggactcgacaagggagagccggtcaacgaggcagacgccgcggccctcgagcacgacaaagcctacgaccggcagctcgacagcggagacaacccgtacctcaagtacaaccacgccgacgcggagtttcaggagcgccttaaagaagatacgtcttttgggggcaacctcggacgagcagtcttccaggcgaaaaagagggttcttgaacctctgggcctggttgaggaacctgttaagacggctccgggaaaaaagaggccggtagagcactctcctgtggagccagactcctcctcgggaaccggaaaggcgggccagcagcctgcaagaaaaagattgaattttggtcagactggagacgcagactcagtacctgacccccagcctctcggacagccaccagcagccctctctggtctgggaactaatacgatggctacaggcagtggcgcaccaatggcagacaataacgagggcgccgacggagtgggtaattcctcgggaaattggcattgcgattccacatggatgggcgacagagtcatcaccaccagcacccgaacctgggccctgcccacctacaacaaccacctctacaaacaaatttccagccaatcaggagcctcgaacggcaatcactactttggctacagcaccccttgggggtattttgacttcaacagattccactgccacttttcaccacgtgactggcaaagactcatcaacaacaactggggattccgacccaagagactcaacttcaagctctttaacattcaagtcaaagaggtcacgcagaatgacggtacgacgacgattgccaataaccttaccagcacggttcaggtgtttactgactcggagtaccagctcccgtacgtcctcggctcggcgcatcaaggatgcctcccgccgttcccagcagacgtcttcatggtgccacagtatggatacctcaccctgaacaacgggagtcaggcagtaggacgctcttcattttactgcctggagtactttccttctcagatgctgcgtaccggaaacaactttaccttcagctacacttttgaggacgttcctttccacagcagctacgctcacagccagagtctggaccgtctcatgaatcctctcatcgaccagtacctgtattacttgagcagaacaaacactccaagtggaaccaccacgcagtcaaggcttcagttttctcaggccggagcgagtgacattcgggaccagtctaggaactggcttcctggaccctgttaccgccagcagcgagtatcaaagacatctgcggataacaacaacagtgaatactcgtggactggagctaccaagtaccacctcaatggcagagactctctggtgaatccgggcccggccatggcaagccacaaggacgatgaagaaaagttttttcctcagagcggggttctcatctttgggaagcaaggctcagagaaaacaaatgtggacattgaaaaggtcatgattacagacgaagaggaaatcaggacaaccaatcccgtggctacggagcagtatggttctgtatctaccaacctccagaggggcaacagacaagcagctaccgcagatgtcaacacacaaggcgttcttccaggcatggtctggcaggacagagatgtgtaccttcaggggcccatctgggcaaagattccacacacggacggacattttcacccctctcccctcatgggtggattcggacttaaacaccctcctccacagattctcatcaagaacaccccggtacctgcgaatccttcgaccaccttcagtgcggcaaagtttgcttccttcatcacacagtactccacgggacaggtcagcgtggagatcgagtgggagctgcagaaggaaaacagcaaacgctggaatcccgaaattcagtacacttccaactacaacaagtctgttaatgtggactttactgtggacactaatggcgtgtattcagagcctcgccccattggcaccagatacctgactcgtaatctgtaa

SEQ ID NO: 4343 - DNA, 2208 bp, Artificial Sequence
  source: /note="Description of Artificial Sequence: Synthetic polynucleotide"
atggctgccgatggttatcttccagattggctcgaggacactctctctgaaggaataagacagtggtggaagctcaaacctggcccaccaccaccaaagcccgcagagcggcatagggacgacagcaggggtcttgtgcttcctgggtacaagtacctcggacccttcaacggactcgacaagggagagccggtcaacgaggcagacgccgcggccctcgagcacgacaaagcctacgaccggcagctcgacagcggagacaacccgtacctcaagtacaaccacgccgacgcggagtttcaggagcgccttaaagaagatacgtcttttgggggcaacctcggacgagcagtcttccaggcgaaaaagagggttcttgaacctctgggcctggttggggaacctgttaagacggctccgggaaaaaagaggccggtagagcactctcctgtggagccagactcctcctcgggaaccggaaaggcgggccagcagcctgcaagaaaaagattgaattttggtcagactggagacgcagactcagtacctgacccccagcctctcggacagccaccagcagccccctctggtctgggaactaatacgatggctacaggcagtggcgcaccaatggcagacaataacgagggcgccgacggagtgggtaattcctcgggaaattggcattgcgattccacatggatgggcgacagagtcatcaccaccagcacccgaacctgggccctgcccacctacaacaaccacctctacaaacaaatttccagccaatcaggagcctcgaacggcaatcactactttggctacagcaccccttgggggtattttgacttcaacagattccactgccacttttcaccacgtgactggcaaagactcatcaacaacaactggggattccgacccaagagactcaacttcaagctctttaacattcaagtcaaagaggtcacgcagaatgacggtacgacgacgattgccaataaccttaccagcacggttcaggtgtttactgactcggagtaccagctcccgtacgtcctcggctcggcgcatcaaggatgcctcccgccgttcccagcagacgtcttcatggtgccacagtatggatacctcaccctgaacaacgggagtcaggcagtaggacgctcttcattttactgcctggagtactttccttctcagatgctgcgtaccggaaacaactttaccttcagctacacttttgaggacgttcctttccacagcagctacgctcacagccagagtctggaccgtctcatgaatcctctcatcgaccagtacctgtattacttgagcagaacaaacactccaagtggaaccaccacgcagtcaaggcttcagttttctcaggccggagcgagtgacattcgggaccagtctaggaactggcttcctggaccctgttaccgccagcagcgagtatcaaagacatctgcggataacaacaacagtgaatactcgtggactggagctaccaagtaccacctcaatggcagagactctctggtgaatccgggcccggccatggcaagccacaaggacgatgaagaaaagttttttcctcagagcggggttctcatctttgggaagcaaggctcagagaaaacaaatgtggacattgaaaaggtcatgattacagacgaagaggaaatcaggacaaccaatcccgtggctacggagcagtatggttctgtatctaccaacctccagaggggcaacagacaagcagctaccgcagatgtcaacacacaaggcgttcttccaggcatggtctggcaggacagagatgtgtaccttcaggggcccatctgggcaaagattccacacacggacggacattttcacccctctcccctcatgggtggattcggacttaaacaccctcctccacagattctcatcaagaacaccccggtacctgcgaatccttcgaccaccttcagtgcggcaaagtttgcttccttcatcacacagtactccacgggacaggtcagcgtggagatcgagtgggagctgcagaaggaaaacagcaaacgctggaatcccgaaattcagtacacttccaactacaacaagtctgttaatgtggactttactgtggacactaatggcgtgtattcagagcctcgccccattggcaccagatacctgactcgtaatctgtaa

SEQ ID NO: 4344 - DNA, 2208 bp, Artificial Sequence
  source: /note="Description of Artificial Sequence: Synthetic polynucleotide"
atggctgccgatggttatcttccagattggctcgaggacactctctctgaaggaataagacagtggtggaagctcaaacctggcccaccaccaccaaagcccgcagagcggcatagggacgacagcaggggtcttgtgcttcctgggtacaagtacctcggacccttcaacggactcgacaagggagagccggtcaacgaggcagacgccgcggccctcgagcacgacaaagcctacgaccggcagctcgacagcggagacaacccgtacctcaagtacaaccacgccgacgcggagtttcaggagcgccttaaagaagatacgtcttttgggggcaacctcggacgagcagtcttccaggcgaaaaagagggttcttgaacctctgggcctggttgaggaacctgttaagacggctccgggaaaaaagaggccggtagagcactctcctgtggagccagactcctcctcgggaaccggaaaggcgggccagcagcctgcaagaaaaagattgaattttggtcagactggagacgcagactcagtacctgacccccagcctctcggacagccaccagcagccccctctggtctgggaactaatacgatggctacaggcagtggcgcaccaatggcagacaataacgagggcgccgacggagtgggtaattcctcgggaaattggcattacgattccgcatggatgggcgacagagtcatcaccaccagcacccgaacctgggccctgcccacctacaacaaccacctctacaaacaaatttccagccaatcaggagcctcgaacggcaatcactactttggctacagcaccccttgggggtattttgacttcaacagattccactgccacttttcaccacgtgactggcaaagactcatcaacaacaactggggattccgacccaagagactcaacttcaagctctttaacattcaagtcaaagaggtcacgcagaatgacggtacgacgacgattgccaataaccttaccagcacggttcaggtgtttactgactcggagtaccagctcccgtacgtcctcggctcggcgcatcaaggatgcctcccgccgttcccagcagacgtcttcatggtgccacagtatggatacctcaccctgaacaacgggagtcaggcagtaggacgctcttcattttactgcctggagtactttccttctcagatgctgcgtaccggaaacaactttaccttcagctacacttttgaggacgttcctttccacagcagctacgctcacagccagagtctggaccgtctcatgaatcctctcatcgaccagtacctgtattacttgagcagaacaaacactccaagtggaaccaccacgcagtcaaggcttcagttttctcaggccggagcgagtgacattcgggaccagtctaggaactggcttcctggaccctgttaccgccagcagcgagtatcaaagacatctgcggataacaacaacagtgaatactcgtggactggagctaccaagtaccacctcaatggcagagactctctggtgaatccgggcccggccatggcaagccacaaggacgatgaagaaaagttttttcctcagagcggggttctcatctttgggaagcaaggctcagagaaaacaaatgtggacattgaaaaggtcatgattacagacgaagaggaaatcaggacaaccaatcccgtggctacggagcagtatggttctgtatctaccaacctccagaggggcaacagacaagcagctaccgcagatgtcaacacacaaggcgttcttccaggcatggtctggcaggacagagatgtgtaccttcaggggcccatctgggcaaagattccacacacggacggacattttcacccctctcccctcatgggtggattcggacttaaacaccctcctccacagattctcatcaagaacaccccggtacctgcgaatccttcgaccaccttcagtgcggcaaagtttgcttccttcatcacacagtactccacgggacaggtcagcgtggagatcgagtgggagctgcagaaggaaaacagcaaacgctggaatcccgaaattcagtacacttccaactacaacaagtctgttaatgtggactttactgtggacactaatggcgtgtattcagagcctcgccccattggcaccagatacctgactcgtaatctgtaa

SEQ ID NO: 4345 - DNA, 2208 bp, Artificial Sequence
  source: /note="Description of Artificial Sequence: Synthetic polynucleotide"
atggctgccgatggttatcttccagattggctcgaggacactctctctgaaggaataagacagtggtggaagctcaaacctggcccaccaccaccaaagcccgcagagcggcatagggacgacagcaggggtcttgtgcttcctgggtacaagtacctcggacccttcaacggactcgacaagggagagccggtcaacgaggcagacgccgcggccctcgagcacgacaaagcctacgaccggcagctcgacagcggagacaacccgtacctcaagtacaaccacgccgacgcggagtttcaggagcgccttaaagaagatacgtcttttgggggcaacctcggacgagcagtcttccaggcgaaaaagagggttcttgaacctctgggcctggttgaggaacctgttaagacggctccgggaaaaaagaggccggtagagcactctcctgtggagccagactcctcctcgggaaccggaaaggcgggccagcagcctgcaagaaaaagattgaattttggtcagactggagacgcagactcagtacctgacccccagcctctcggacagccaccagcagccccctctggtctgggaactaatacgatggctacaggcagtggcgcaccaatggcagacaataacgagggcgccgacggagtgggtaattcctcgggaaattggcattgcgattccacatggatgggcgacagagtcatcaccaccagcacccgaacctgggccctgcccacctacaacaaccacctctacaaacaaatttccagccaatcaggagcctcgaacggcaatcactactttggctacagcaccccttgggggtattttgacttcaacagattccactgccacttttcaccacgtgactggcaaagactcatcaacaacaactggggattccgacccaagagactcaacttcaagctctttaacattcaagtcaaagaggtcacgcagaatgacggtacgacgacgattgccaataaccttaccagcacggttcaggtgtttactgactcggagtaccagctcccgtacgtcctcggctcggcgcatcaaggatgcctcccgccgttcccagcagacgtcttcatggtgccacagtatggatacctcaccctgaacaacgggagtcaggcagtaggacgctcttcattttactgcctggagtactttccttctcagatgctgcgtaccggaaacaactttaccttcagctacacttttgaggacgttcctttccacagcagctacgctcacagccagagtctggaccgtctcatgaatcctctcatcgaccagtacctgtattacttgagcagaacaaacactccaagtggaaccaccacgcagtcaaggcttcagttttctcaggccggagcgagtgacattcgggaccagtctaggaactggcttcctggaccctgttaccgccagcagcgagtatcaaagacatctgcggataacaacaacagtgaatactcgtggactggagctaccaagtaccacctcaatggcagagactctctggtgaatccgggcccggccatggcaagccacaaggacgatgaagaaaagttttttcctcagagcggggttctcatctttgggaagcaaggctcagagaaaacaaatgtggacattgaaaaggtcatgattacagacgaagaggaaatcaggacaaccaatcccgtggctacggagcagtatggttctgtatctaccaacctccagaggggcaacagacaagcagctaccgcagatgtcaacacacaaggcgttcttccaggcatggtctggcaggacagagatgtgtaccttcaggggcccatctgggcaaagattccacacacggacggacattttcacccctctcccctcatgggtggattcggacttaaacaccctcctccacagattctcatcaagaacaccccggtacctgcgaatccttcgaccaccttcagtgcggcaaagtttgcttccttcatcgcacagtactccacgggacaggtcagcgtggagatcgagtgggagctgcagaaggaaaacagcaaacgctggaatcccgaaattcagtacacttccaactacaacaagtctgttaatgtggactttactgtggacactaatggcgtgtattcagagcctcgccccattggcaccagatacctgactcgtaatctgtaa

SEQ ID NO: 4346 - DNA, 2208 bp, Artificial Sequence
  source: /note="Description of Artificial Sequence: Synthetic polynucleotide"
atggctgccgatggttatcttccagattggctcgaggacactctctctgaaggaataagacagtggtggaagctcaaacctggcccaccaccaccaaagcccgcagagcggcatagggacgacagcaggggtcttgtgcttcctgggtacaagtacctcggacccttcaacggactcgacaagggagagccggtcaacgaggcagacgccgcggccctcgagcacgacaaagcctacgaccggcagctcgacagcggagacaacccgtacctcaagtacaaccacgccgacgcggagtttcaggagcgccttaaagaagatacgtcttttgggggcaacctcggacgagcagtcttccaggcgaaaaagagggttcttgaacctctgggcctggttgaggaacctgttaagacggctccgggaaaaaagaggccggtagagcactctcctgtggagccagactcctcctcgggaaccggaaaggcgggccagcagcctgcaagaaaaagattgaattttggtcagactggagacgcagactcagtacctgacccccagcctctcggacagccaccagcagccccctctggtctgggaactaatacgatggctacaggcagtggcgcaccaatggcagacaataacgagggcgccgacggagtgggtaattcctcgggaaattggcattgcgattccacatggatgggcgacagagtcatcaccaccagcacccgaacctgggccctgcccacctacaacaaccacctctacaaacaaatttccagccaatcaggagcctcgaacggcaatcactactttggctacagcaccccttgggggtattttgacttcaacagattccactgccacttttcaccacgtgactggcaaagactcatcaacaacaactggggattccgacccaagagactcaacttcaagctctttaacattcaagtcaaagaggtcacgcagaatgacggtacgacgacgattgccaataaccttaccagcacggttcaggtgtttactgactcggagtaccagctcccgtacgtcctcggctcggcgcatcaaggatgcctcccgccgttcccagcagacgtcttcatggtgccacagtatggatacctcaccctgaacaacgggagtcaggcagtaggacgctcttcattttactgcctggagtactttccttctcagatgctgcgtaccggaaacaactttaccttcagctacacttttgaggacgttcctttccacagcagctacgctcacagccagagtctggaccgtctcatgaatcctctcatcgaccagtacccgtattacttgagcagaacaaacactccaagtggaaccaccacgcagtcaaggcttcagttttctcaggccggagcgagtgacattcgggaccagtctaggaactggcttcctggaccctgttaccgccagcagcgagtatcaaagacatctgcggataacaacaacagtgaatactcgtggactggagctaccaagtaccacctcaatggcagagactctctggtgaatccgggcccggccatggcaagccacaaggacgatgaagaaaagttttttcctcagagcggggttctcatctttgggaagcaaggctcagagaaaacaaatgtggacattgaaaaggtcatgattacagacgaagaggaaatcaggacaaccaatcccgtggctacggagcagtatggttctgtatctaccaacctccagaggggcaacagacaagcagctaccgcagatgtcaacacacaaggcgttcttccaggcatggtctggcaggacagagatgtgtaccttcaggggcccatctgggcaaagattccacacacggacggacattttcacccctctcccctcatgggtggattcggacttaaacaccctcctccacagattctcatcaagaacaccccggtacctgcgaatccttcgaccaccttcagtgcggcaaagtttgcttccttcatcacacagtactccacgggacaggtcagcgtggagatcgagtgggagctgcagaaggaaaacagcaaacgctggaatcccgaaattcagtacacttccaactacaacaagtctgttaatgtggactttactgtggacactaatggcgtgtattcagagcctcgccccattggcaccagatacctgactcgtaatctgtaa

SEQ ID NO: 4347 - DNA, 2208 bp, Artificial Sequence
  source: /note="Description of Artificial Sequence: Synthetic polynucleotide"
atggctgccgatggttatcttccagattggctcgaggacactctctctgaaggaataagacagtggtggaagctcaaacctggcccaccaccaccaaagcccgcagagcggcatagggacgacagcaggggtcttgtgcttcctgggtacaagtacctcggacccttcaacggactcgacaagggagagccggtcaacgaggcagacgccgcggccctcgagcacgacaaagcctacgaccggcagctcgacagcggagacaacccgtacctcaagtacaaccacgccgacgcggagtttcaggagcgccttaaagaagatacgtcttttgggggcaacctcggacgagcagtcttccaggcgaaaaagagggttcttgaacctctgggcctggttgaggaacctgttaagacggctccgggaaaaaagaggccggtagagcactctcctgtggagccagactcctcctcgggaaccggaaaggcgggccagcagcctgcaagaaaaagattgaattttggtcagactggagacgcagactcagtacctgacccccagcctctcggacagccaccagcagccccctctggtctgggaactaatacgatggctacaggcagtggcgcaccaatggcagacaataacgagggcgccgacggagtgggtaattcctcgggaaattggcattgcgattccacatggatgggcgacagagtcatcaccaccagcacccgaacctgggccctgcccacctacaacaaccacctctacaaacaaatttccagccaatcaggagcctcgaacggcaatcactactttggctacagcaccccttgggggtattttgacttcaacagattccactgccacttttcaccacgtgaccggcaaagactcatcaacaacaactggggattccgacccaagagactcaacttcaagctctttaacattcaagtcaaagaggtcacgcagaatgacggtacgacgacgattgccaataaccttaccagcacggttcaggtgtttactgactcggagtaccagctcccgtacgtcctcggctcggcgcatcaaggatgcctcccgccgttcccagcagacgtcttcatggtgccacagtatggatacctcaccctgaacaacgggagtcaggcagtaggacgctcttcattttactgcctggagtactttccttctcagatgctgcgtaccggaaacaactttaccttcagctacacttttgaggacgttcctttccacagcagctacgctcacagccagagtctggaccgtctcatgaatcctctcatcgaccagtacctgtattacttgagcagaacaaacactccaagtggaaccaccacgcagtcaaggcttcagttttctcaggccggagcgagtgacattcgggaccagtctaggaactggcttcctggaccctgttaccgccagcagcgagtatcaaagacatctgcggataacaacaacagtgaatactcgtggactggagctaccaagtaccacctcaatggcagagactctctggtgaatccgggcccggccatggcaagccacaaggacgatgaagaaaagttttttcctcagagcggggttctcatctttgggaagcaaggctcagagaaaacaaatgtggacattgaaaaggtcatgattacagacgaagaggaaatcaggacaaccaatcccgtggctacggagcagtatggttctgtatctaccaacctccagaggggcaacagacaagcagctaccgcagatgtcaacacacaaggcgttcttccaggcatggtctggcaggacagagatgtgtaccttcaggggcccatctgggcaaagattccacacacggacggacattttcacccctctcccctcatgggtggattcggacttaaacaccctcctccacagattctcatcaagaacaccccggtacctgcgaatccttcgaccaccttcagtgcggcaaagtttgcttccttcatcacacagtactccacgggacaggtcagcgtggagatcgagtgggagctgcagaaggaaaacagcaaacgctggaatcccgaaattcagtacacttccaactacaacaagtctgttaatgtggactttactgtggacactaatggcgtgtattcagagcctcgccccattggcaccagatacctgactcgtaatctgtaa

SEQ ID NO: 4348 - DNA, 2208 bp, Artificial Sequence
  source: /note="Description of Artificial Sequence: Synthetic polynucleotide"
atggctgccgatggttatcttccagattggctcgaggacactctctctgaaggaataagacagtggtggaagctcaaacctggcccaccaccaccaaagcccgcagagcggcatagggacgacagcaggggtcttgtgcttcctgggtacaagtacctcggacccttcaacggactcgacaagggagagccggtcaacgaggcagacgccgcggccctcgagcacgacaaagcctacgaccggcagctcgacagcggagacaacccgtacctcaagtacaaccacgccgacgcggagtttcaggagcgccttaaagaagatacgtcttttgggggcaacctcggacgagcagtcttccaggcgaaaaagagggttcttgaacctctgggcctggttgaggaacctgttaagacggctccgggaaaaaagaggccggtagagcactctcctgtggagccagactcctcctcgggaaccggaaaggcgggccagcagcctgcaagaaaaagattgaattttggtcagactggagacgcagactcagtacctgacccccagcctctcggacagccaccagcagccccctctggtctgggaactaatacgatggctacaggcagtggcgcaccaatggcagacaataacgagggcgccgacggagtgggtaattcctcgggaaattggcattgcgattccacatggatgggcgacagagtcatcaccaccagcacccgaacctgggccctgcccacctacaacaaccacctctacaaacaaatttccagccaatcaggagcctcgaacggcaatcactactttggctacagcaccccttgggggtattttgacttcaacagattccactgccacttttcaccacgtgactggcaaagactcatcaacaacaactggggattccgacccaagagactcaacttcaagctctttaacattcaagtcaaagaggtcacgcagaatgacggtacgacgacgattgccaataaccttaccagcacggttcaggtgtttactgactcggagtaccagctcccgtacgtcctcggctcggcgcatcaaggatgcctcccgccgttcccagcagacgtcttcatggtgccacagtatggatacctcaccctgaacaacgggagtcaggcagtaggacgctcttcattttactgcctggagtactttccttctcagatgctgcgtaccggaaacaactttaccttcagctacacttttgaggacgttcctttccacagcagctacgctcacagccagagtctggaccgtctcatgaatcctctcatcgaccagtacctgtattacttgagcagaacaaacactccaagtggaaccaccacgcagtcaaggcttcagttttctcaggccggagcgagtgacattcgggaccagtctaggaactggcttcctggaccctgttaccgccagcagcgagtatcaaagacatctgcggataacaacaacagtgaatactcgtggactggagctaccaagtaccacctcaatggcagagactctctggtgaatccgggcccggccatggcaagccacaaggacgatgaagaaaagttttttcctcagagcggggttctcatctttgggaagcaaggctcagagaaaacaaatgtggacattgaaaaggtcatgattacagacgaagaggaaatcaggacaaccaatcccgtggctacggagcagtatggttctgtatctaccaacctccagaggggcaacagacaagcagctaccgcagatgtcaacacacaaggcgttcttccaggcatggtctggcaggacagagatgtgtaccttcaggggcccatctgggcaaagattccacacacggacggacattttcacccctctcccctcatgggtggattcggacttaaacaccctcctccacagattctcatcaagaacaccccggtacctgcgaatccttcgaccaccttcagtgcggcaaagtttgcttccttcatcacacagtactccacgggacaggtcagcgtggagatcgagtgggagctgcagaaggaaaacagcaaacgctggaatcccgaaattcagtacacttccaactacaacaagtctgttaatgtggaccttactgtggacactaatggcgtgtattcagagcctcgccccattggcaccagatacctgactcgtaatctgtaa

SEQ ID NO: 4349 - DNA, 2208 bp, Artificial Sequence
  source: /note="Description of Artificial Sequence: Synthetic polynucleotide"
atggctgccgatggttatcttccagattggctcgaggacactctctctgaaggaataagacagtggtggaagctcaaacctggcccaccaccaccaaagcccgcagagcggcatagggacgacagcaggggtcttgcgcttcctgggtacaagtacctcggacccttcaacggactcgacaagggagagccggtcaacgaggcagacgccgcggccctcgagcacgacaaagcctacgaccggcagctcgacagcggagacaacccgtacctcaagtacaaccacgccgacgcggagtttcaggagcgccttaaagaagatacgtcttttgggggcaacctcggacgagcagtcttccaggcgaaaaagagggttcttgaacctctgggcctggttgaggaacctgttaagacggctccgggaaaaaagaggccggtagagcactctcctgtggagccagactcctcctcgggaaccggaaaggcgggccagcagcctgcaagaaaaagattgaattttggtcagactggagacgcagactcagtacctgacccccagcctctcggacagccaccagcagccccctctggtctgggaactaatacgatggctacaggcagtggcgcaccaatggcagacaataacgagggcgccgacggagtgggtaattcctcgggaaattggcattgcgattccacatggatgggcgacagagtcatcaccaccagcacccgaacctgggccctgcccacctacaacaaccacctctacaaacaaatttccagccaatcaggagcctcgaacggcaatcactactttggctacagcaccccttgggggtattttgacttcaacagattccactgccacttttcaccacgtgactggcaaagactcatcaacaacaactggggattccgacccaagagactcaacttcaagctctttaacattcaagtcaaagaggtcacgcagaatgacggtacgacgacgattgccaataaccttaccagcacggttcaggtgtttactgactcggagtaccagctcccgtacgtcctcggctcggcgcatcaaggatgcctcccgccgttcccagcagacgtcttcatggtgccacagtatggatacctcaccctgaacaacgggagtcaggcagtaggacgctcttcattttactgcctggagtactttccttctcagatgctgcgtaccggaaacaactttaccttcagctacacttttgaggacgttcctttccacagcagctacgctcacagccagagtctggaccgtctcatgaatcctctcatcgaccagtacctgtattacttgagcagaacaaacactccaagtggaaccaccacgcagtcaaggcttcagttttctcaggccggagcgagtgacattcgggaccagtctaggaactggcttcctggaccctgttaccgccagcagcgagtatcaaagacatctgcggataacaacaacagtgaatactcgtggactggagctaccaagtaccacctcaatggcagagactctctggtgaatccgggcccggccatggcaagccacaaggacgatgaagaaaagttttttcctcagagcggggttctcatctttgggaagcaaggctcagagaaaacaaatgtggacattgaaaaggtcatgattacagacgaagaggaaatcaggacaaccaatcccgtggctacggagcagtatggttctgtatctaccaacctccagaggggcaacagacaagcagctaccgcagatgtcaacacacaaggcgttcttccaggcatggtctggcaggacagagatgtgtaccttcaggggcccatctgggcaaagattccacacacggacggacattttcacccctctcccctcatgggtggattcggacttaaacaccctcctccacagattctcatcaagaacaccccggtacctgcgaatccttcgaccaccttcagtgcggcaaagtttgcttccttcatcacacagtactccacgggacaggtcagcgtggagatcgagtgggagctgcagaaggaaaacagcaaacgctggaatcccgaaattcagtacacttccaactacaacaagtctgttaatgtggactttactgtggacactaatggcgtgtattcagagcctcgccccattggcaccagatacctgactcgtaatctgtaa

SEQ ID NO: 4350 - DNA, 2208 bp, Artificial Sequence
  source: /note="Description of Artificial Sequence: Synthetic polynucleotide"
atggctgccgatggttatcttccagattggctcgaggacactctctctgaaggaataagacagtggtggaagctcaaacctggcccaccaccaccaaagcccgcagagcggcatagggacgacagcaggggtcttgtgcttcctgggtacaagtacctcggacccttcaacggactcgacaagggagagccggtcaacgaggcagacgccgcggccctcgagcacgacaaagcctacgaccggcagctcgacagcggagacaacccgtacctcaagtacaaccacgccgacgcggagtttcaggagcgccttaaagaagatacgtcttttgggggcaacctcggacgagcagtcttccaggcgaaaaagagggttcttgaacctctgggcctggttgaggaacctgttaagacggctccgggaaaaaagaggccggtagagcactctcctgtggagccagactcctcctcgggaaccggaaaggcgggccagcagcctgcaagaaaaagattgaattttggtcagactggagacgcagactcagtacctgacccccagcctctcggacagccaccagcagccccctctggtctgggaactaatacgatggctacaggcagtggcgcaccaatggcagacaataacgagggcgccgacggagtgggtaattcctcgggaaattggcattgcgattccacatggatgggcgacagagtcatcaccaccagcacccgaacctgggccctgcccacctacaacaaccacctctacaaacaaatttccagccaatcaggagcctcgaacggcaatcactactttggctacagcaccccttgggggtattttgacttcaacagattccactgccacttttcaccacgtgactggcaaagactcatcaacaacaactggggattccgacccaagagactcaacttcaagctctttaacattcaagtcaaagaggtcacgcagaatgacggtacgacgacgattgccaataaccttaccagcacggttcaggtgtttactgactcggagtaccagctcccgtacgtcctcggctcggcgcatcaaggatgcctcccgccgttcccagcagacgtcttcatggtgccacagtatggatacctcaccctgaacaacgggagtcaggcagtaggacgctcttcattttactgcctggagtactttccttctcagatgctgcgtaccggaaacaactttaccttcagctacacttttgaggacgttcctttccacagcagctacgctcacagccagagtctggaccgtctcatgaatcctctcatcgaccagtacctgtattacttgagcagaacaaacactccaagtggaaccaccacgcagtcaaggcttcagttttctcaggccggagcgagtgacattcgggaccagtctaggaactggcttcctggaccctgttaccgccagcagcgagtatcaaagacatctgcggataacaacaacagtgaatactcgtggactggagctaccaagtaccacctcaatggcagagactctctggtgaatccgggcccggccatggcaagccacaaggacgatgaagaaaagttttttcctcagagcggggttctcatctttgggaagcaaggctcagagaaaacaaatgtggacattgaaaaggtcatgattacagacgaagaggaaatcaggacaaccaatcccgtggctacggagcagtatggttctgtatctaccaacctccagaggggcaacagacaagcagctaccgcagatgccaacacacaaggcgttcttccaggcatggtctggcaggacagagatgtgtaccttcaggggcccatctgggcaaagattccacacacggacggacattttcacccctctcccctcatgggtggattcggacttaaacaccctcctccacagattctcatcaagaacaccccggtacctgcgaatccttcgaccaccttcagtgcggcaaagtttgcttccttcatcacacagtactccacgggacaggtcagcgtggagatcgagtgggagctgcagaaggaaaacagcaaacgctggaatcccgaaattcagtacacttccaactacaacaagtctgttaatgtggactttactgtggacactaatggcgtgtattcagagcctcgccccattggcaccagatacctgactcgtaatctgtaa

SEQ ID NO: 4351 - DNA, 2208 bp, Artificial Sequence
  source: /note="Description of Artificial Sequence: Synthetic polynucleotide"
atggctgccgatggttatcttccagattggctcgaggacactctctctgaaggaataagacagtggtggaagctcaaacctggcccaccaccaccaaagcccgcagagcggcatagggacgacagcaggggtcttgtgcttcctgggtacaagtacctcggacccttcaacggactcgacaagggagagccggtcaacgaggcagacgccgcggccctcgagcacgacaaagcctacgaccggcagctcgacagcggagacaacccgtacctcaagtacaaccacgccgacgcggagtttcaggagcgccttaaagaagatacgtcttttgggggcaacctcggacgagcagtcttccaggcgaaaaagagggttcttgaacctctgggcctggttgaggaacctgttaagacggctccgggaaaaaagaggccggtagagcactctcctgtggagccagactcctcctcgggaaccggaaaggcgggccagcagcctgcaagaaaaagattgaattttggtcagactggagacgcagactcagtacctgacccccagcctctcggacagccaccagcagccccctctggtctgggaactaatacgatggctacaggcagtggcgcaccaatggcagacaataacgagggcgccgacggagtgggtaattcctcgggaaattggcattgcgattccacatggatgggcgacagagtcatcaccaccagcacccgaacctgggccctgcccacctacaacaaccacctctacaaacaaatttccagccaatcaggagcctcgaacggcaatcactactttggctacagcaccccttgggggtattttgacttcaacagattccactgccacttttcaccacgtgactggcaaagactcatcaacaacaactggggattccgacccaagagactcaacttcaagctctttaacattcaagtcaaagaggtcacgcagaatgacggtacgacgacgattgccaataaccttaccagcacggttcaggtgtttactgactcggagtaccagctcccgtacgtcctcggctcggcgcatcaaggatgcctcccgccgttcccagcagacgtcttcatggtgccacagtatggatacctcaccctgaacaacgggagtcaggcagtaggacgctcttcattttactgcctggagtactttccttctcagatgctgcgtaccggaaacaactttaccttcagctacacttttgaggacgttcctttccacagcagctacgctcacagccagagtctggaccgtctcatgaatcctctcatcgaccagtacctgtattacttgagcagaacaaacactccaagtggaaccaccacgcagtcaaggcttcagttttctcaggccggagcgagtgacattcgggaccagtctaggaactggcttcctggaccctgttaccgccagcagcgagtatcaaagacatctgcggataacaacaacagtgaatactcgtggactggagctaccaagtaccacctcaatggcagagactctctggtgaatccgggcccggccatggcaagccacaaggacgatgaagaaaagttttttcctcagagcggggttctcatctttgggaagcaaggctcagagaaaacaaatgtggacattgaaaaggtcatgattacagacgaaggggaaatcaggacaaccaatcccgtggctacggagcagtatggttctgtatctaccaacctccagaggggcaacagacaagcagctaccgcagatgtcaacacacaaggcgttcttccaggcatggtctggcaggacagagatgtgtaccttcaggggcccatctgggcaaagattccacacacggacggacattttcacccctctcccctcatgggtggattcggacttaaacaccctcctccacagattctcatcaagaacaccccggtacctgcgaatccttcgaccaccttcagtgcggcaaagtttgcttccttcatcacacagtactccacgggacaggtcagcgtggagatcgagtgggagctgcagaaggaaaacagcaaacgctggaatcccgaaattcagtacacttccaactacaacaagtctgttaatgtggactttactgtggacactaatggcgtgtattcagagcctcgccccattggcaccagatacctgactcgtaatctgtaa

SEQ ID NO: 4352 - DNA, 2208 bp, Artificial Sequence
  source: /note="Description of Artificial Sequence: Synthetic polynucleotide"
atggctgccgatggttatcttccagattggctcgaggacactctctctgaaggaataagacagtggtggaagctcaaacctggcccaccaccaccaaagcccgcagagcggcatagggacgacagcaggggtcttgtgcttcctgggtacaagtacctcggacccttcaacggactcgacaagggagagccggtcaacgaggcagacgccgcggccctcgagcacgacaaagcctacgaccggcagctcgacagcggagacaacccgtacctcaagtacaaccacgccgacgcggagtttcaggagcgccttaaagaagatacgtcttttgggggcaacctcggacgagcagtcttccaggcgaaaaagagggttcttgaacctctgggcctggttgaggaacctgttaagacggctccgggaaaaaagaggccggtagagcactctcctgtggagccagactcctcctcgggaaccggaaaggcgggccagcagcctgcaagaaaaagattgaattttggtcagactggagacgcagactcagtacctgacccccagcctctcggacagccaccagcagccccctctggtctgggaactaatacgatggctacaggcagtggcgcaccaatggcagacaataacgagggcgccgacggagtgggtaattcctcgggaaattggcattgcgattccacatggatgggcgacagagtcatcaccaccagcacccgaacctgggccctgcccacctacaacaaccacctctacaaacaaatttccagccaatcaggagcctcgaacggcaatcactactttggctacagcaccccttgggggtattttgacttcaacagattccactgccacttttcaccacgtgactggcaaagactcatcaacaacaactggggattccgacccaagagactcaacttcaagctctttaacattcaagtcaaagaggtcacgcagaatgacggtacgacgacgattgccaataaccttaccagcacggttcaggtgtttactgactcggagtaccagctcccgtacgtcctcggctcggcgcatcaaggatgcctcccgccgttcccagcagacgtcttcatggtgccacagtatggatacctcaccctgaacaacgggagtcaggcagtaggacgctcttcattttactgcctggagtactttccttctcagatgctgcgtaccggaaacaactttaccttcagctacacttttgaggacgttcctttccacagcagctacgctcacagccagagtctggaccgtctcatgaatcctctcatcgaccagtacctgtattacttgagcagaacaaacactccaagtggaaccaccacgcagtcaaggcttcagttttctcaggccggagcgagtgacattcgggaccagtctaggaactggcttcctggaccctgttaccgccagcagcgagtatcaaagacatctgcggataacaacaacagtgaatactcgtggactggagctaccaagtaccacctcaatggcagagactctctggtgaatccgggcccggccatggcaagccacaaggacgatgaagaaaagttttttcctcagagcggggttctcatctttgggaagcaaggctcagagaaaacaaatgtggacattgaaaaggtcatgattacagacgaagaggaaatcaggacaaccaatcccgtggctacggagcagtatggttctgtatctaccaacctccagaggggcaacagacaagcagctaccgcagatgtcaacacacaaggcgttcttccaggcatggtctggcaggacagagatgtgtaccttcaggggcccatctgggcaaagattccacacacggacggacattttcacccctctccccccatgggtggattcggacttaaacaccctcctccacagattctcatcaagaacaccccggtacctgcgaatccttcgaccaccttcagtgcggcaaagtttgcttccttcatcacacagtactccacgggacaggtcagcgtggagatcgagtgggagctgcagaaggaaaacagcaaacgctggaatcccgaaattcagtacacttccaactacaacaagtctgttaatgtggactttactgtggacactaatggcgtgtattcagagcctcgccccattggcaccagatacctgactcgtaatctgtaa

SEQ ID NO: 4353 - DNA, 2208 bp, Artificial Sequence
  source: /note="Description of Artificial Sequence: Synthetic polynucleotide"
atggctgccgatggttatcttccagattggctcgaggacactctctctgaaggaataagacagtggtggaagctcaaacctggcccaccaccaccaaagcccgcagagcggcatagggacgacagcaggggtcttgtgcttcctgggtacaagtacctcggacccttcaacggactcgacaagggagagccggtcaacgaggcagacgccgcggccctcgagcacgacaaagcctacgaccggcagctcgacagcggagacaacccgtacctcaagtacaaccacgccgacgcggagtttcaggagcgccttaaagaagatacgtcttttgggggcaacctcggacgagcagtcttccaggcgaaaaagagggttcttgaacctctgggcctggttgaggaacctgttaagacggctccgggaaaaaagaggccggtagagcactctcctgtggagccagactcctcctcgggaaccggaaaggcgggccagcagcctgcaagaaaaagattgaattttggtcagactggagacgcagactcagtacctgacccccagcctctcggacagccaccagcagccccctctggtctgggaactaatacgatggctacaggcagtggcgcaccaatggcagacaataacgagggcgccgacggagtgggtaattcctcgggaaattggcattgcgattccacatggatgggcgacagagtcatcaccaccagcacccgaacctgggccctgcccacctacaacaaccacctctacaaacaaatttccagccaatcaggagcctcgaacggcaatcactactttggctacagcaccccttgggggtattttgacttcaacagattccactgccacttttcaccacgtgactggcaaagactcatcaacaacaactggggattccgacccaagagactcaacttcaagctctttaacattcaagtcaaagaggtcacgcagaatgacggtacgacgacgattgccaataaccttaccagcacggttcaggtgtttactgactcggagtaccagctcccgtacgtcctcggctcggcgcatcaaggatgcctcccgccgttcccagcagacgtcttcatggtgccacagtatggatacctcaccctgaacaacgggagtcaggcagtaggacgctcttcattttactgcctggagtactttccttctcagatgctgcgtaccggaaacaactttaccttcagctacacttttgaggacgttcctttccacagcagctacgctcacagccagagtctggaccgtctcatgaatcctctcatcgaccagtacctgtattacttgagcagaacaaacactccaagtggaaccaccacgcagtcaaggcttcagttttctcaggccggagcgagtgacattcgggaccagtctaggaactggcttcctggaccctgttaccgccagcagcgagtatcaaagacatctgcggataacaacaacagtgaatactcgtggactggagctaccaagtaccacctcaatggcagagactctctggtgaatccgggcccggccatggcaagccacaaggacgatgaagaaaagttttttcctcagagcggggttctcatctttgggaagcaaggctcagagaaaacaaatgtggacattgaaaaggtcatgattacagacgaagaggaaatcaggacaaccaatcccgtggctacggagcagtatggttctgtatctaccaacctccagaggggcaacagacaagcagctaccgcagatgtcaacacacaaggcgttcttccaggcatggtctggcaggacagagatgtgtaccttcaggggcccatctgggcaaagattccacacacggacggacattttcacccctctcccctcatgggtggattcggacttaaacaccctcctccacagattctcatcaagaacaccccggtacctgcgaatccttcgaccaccttcagtgcggcaaagtttgcttccttcatcacacagtactccacgggacaggtcagcgtggagatcgagtgggagctgcagaaggaaaacagcaaacgctggaatcccgaaattcagtacacttccgactacaacaagtctgttaatgtggactttactgtggacactaatggcgtgtattcagagcctcgccccattggcaccagatacctgactcgtaatctgtaa

SEQ ID NO: 4354 - DNA, 2208 bp, Artificial Sequence
  source: /note="Description of Artificial Sequence: Synthetic polynucleotide"
atggctgccgatggttatcttccagattggctcgaggacactctctctgaaggaataagacagtggtggaagctcaaacctggcccaccaccaccaaagcccgcagagcggcatagggacgacagcaggggtcttgtgcttcctgggtacaagtacctcggacccttcaacggactcgacaagggagagccggtcaacgaggcagacgccgcggccctcgagcacgacaaagcctacgaccggcagctcgacagcggagacaacccgtacctcaagtacaaccacgccgacgcggagtttcaggagcgccttaaagaagatacgtcttttgggggcaacctcggacgagcagtcttccaggcgaaaaagagggttcttgaacctctgggcctggttgaggaacctgttaagacggctccgggaaaaaagaggccggtagagcactctcctgtggagccagactcctcctcgggaaccggaaaggcgggccagcagcctgcaagaaaaagattgaattttggtcagactggagacgcagactcagtacctgacccccagcctctcggacagccaccagcagccccctctggtctgggaactaatacgatggctacaggcagtggcgcaccaatggcagacaataacgagggcgccgacggagtgggtaattcctcgggaaattggcattgcgattccacatggatgggcgacagagtcatcaccaccagcacccgaacctgggccctgcccacctacaacaaccacctctacaaacaaatttccagccaatcaggagcctcgaacggcaatcactactttggctacagcaccccttgggggtattttgacttcaacagattccactgccacttttcaccacgtgactggcaaagactcatcaacaacaactggggattccgacccaagagactcaacttcaagctctttaacattcaagtcaaagaggtcacgcagaatggcggtacgacgacgattgccaataaccttaccagcacggttcaggtgtttactgactcggagtaccagctcccgtacgtcctcggctcggcgcatcaaggatgcctcccgccgttcccagcagacgtcttcatggtgccacagtatggatacctcaccctgaacaacgggagtcaggcagtaggacgctcttcattttactgcctggagtactttccttctcagatgctgcgtaccggaaacaactttaccttcagctacacttttgaggacgttcctttccacagcagctacgctcacagccagagtctggaccgtctcatgaatcctctcatcgaccagtacctgtattacttgagcagaacaaacactccaagtggaaccaccacgcagtcaaggcttcagttttctcaggccggagcgagtgacattcgggaccagtctaggaactggcttcctggaccctgttaccgccagcagcgagtatcaaagacatctgcggataacaacaacagtgaatactcgtggactggagctaccaagtaccacctcaatggcagagactctctggtgaatccgggcccggccatggcaagccacaaggacgatgaagaaaagttttttcctcagagcggggttctcatctttgggaagcaaggctcagagaaaacaaatgtggacattgaaaaggtcatgattacagacgaagaggaaatcaggacaaccaatcccgtggctacggagcagtatggttctgtatctaccaacctccagaggggcaacagacaagcagctaccgcagatgtcaacacacaaggcgttcttccaggcatggtctggcaggacagagatgtgtaccttcaggggcccatctgggcaaagattccacacacggacggacattttcacccctctcccctcatgggtggattcggacttaaacaccctcctccacagattctcatcaagaacaccccggtacctgcgaatccttcgaccaccttcagtgcggcaaagtttgcttccttcatcacacagtactccacgggacaggtcagcgtggagatcgagtgggagctgcagaaggaaaacagcaaacgctggaatcccgaaattcagtacacttccaactacaacaagtctgttaatgtggactttactgtggacactaatggcgtgtattcagagcctcgccccattggcaccagatacctgactcgtaatctgtaa

SEQ ID NO: 4355 - DNA, 2208 bp, Artificial Sequence
  source: /note="Description of Artificial Sequence: Synthetic polynucleotide"
atggctgccgatggttatcttccagattggctcgaggacactctctctgaaggaataagacagtggtggaagctcaaacctggcccaccaccaccaaagcccgcagagcggcatagggacgacagcaggggtcttgtgcttcctgggtacaagtacctcggacccttcaacggactcgacaagggagagccggtcaacgaggcagacgccgcggccctcgagcacgacaaagcctacgaccggcagctcgacagcggagacaacccgtacctcaagtacaaccacgccgacgcggagtttcaggagcgccttaaagaagatacgtcttttgggggcaacctcggacgagcagtcttccaggcgaaaaagagggttcttgaacctctgggcctggttgaggaacctgttaagacggctccgggaaaaaagaggccggtagagcactctcctgtggagccagactcctcctcgggaaccggaaaggcgggccagcagcctgcaagaaaaagattgaattttggtcagactggagacgcagactcagtacctgacccccagcctctcggacagccaccagcagccccctctggtctgggaactaatacgatggctacaggcagtggcgcaccaatggcagacaataacgagggcgccgacggagtgggtaattcctcgggaaattggcattgcgattccacatggatgggcgacagagtcatcaccaccagcacccgaacctgggccctgcccacctacaacaaccacctctacaaacaaatttccagccaatcaggagcctcgaacggcaatcactactttggctacagcaccccttgggggtattttgacttcaacagattccactgccacttttcaccacgtgactggcaaagactcatcaacaacaactggggattccgacccaagagactcaacttcaagctctttaacattcaagtcaaagaggtcacgcagaatgacggtacgacgacgattgccaataaccttaccagcacggttcaggtgtttactgactcggagtaccagctcccgtacgtcctcggctcggcgcatcaaggatgcctcccgccgttcccagcagacgtcttcatggtgccacagtatggatacctcaccctgaacaacgggagtcaggcagtaggacgctcttcattttactgcctggagtactttccttctcagatgctgcgtaccggaaacaactttaccttcagctacacttttgaggacgttcctttccacagcagctacgctcacagccagagtctggaccgtctcatgaatcctctcatcgaccagtacctgtattacttgagcagaacaaacactccaagtggaaccaccacgcagtcaaggcttcagttttctcaggccgtagcgagtgacgttcgggaccagtctaggaactggcttcctggaccctgttaccgccagcagcgagtatcaaagacatctgcggataacaacaacagtgaatactcgtggactggagctaccaagtaccacctcaatggcagagactctctggtgaatccgggcccggccatggcaagccacaaggacgatgaagaaaagttttttcctcagagcggggttctcatctttgggaagcaaggctcagagaaaacaaatgtggacattgaaaaggtcatgattacagacgaagaggaaatcaggacaaccaatcccgtggctacggagcagtatggttctgtatctaccaacctccagaggggcaacagacaagcagctaccgcagatgtcaacacacaaggcgttcttccaggcatggtctggcaggacagagatgtgtaccttcaggggcccatctgggcaaagattccacacacggacggacattttcacccctctcccctcatgggtggattcggacttaaacaccctcctccacagattctcatcaagaacaccccggtacctgcgaatccttcgaccaccttcagtgcggcaaagtttgcttccttcatcacacagtactccacgggacaggtcagcgtggagatcgagtgggagctgcagaaggaaaacagcaaacgctggaatcccgaaattcagtacacttccaactacaacaagtctgttaatgtggactttactgtggacactaatggcgtgtattcagagcctcgccccattggcaccagatacctgactcgtaatctgtaa

SEQ ID NO: 4356 - DNA, 2208 bp, Artificial Sequence
  source: /note="Description of Artificial Sequence: Synthetic polynucleotide"
atggctgccgatggttatcttccagattggctcgaggacactctctctgaaggaataagacagcggtggaagctcaaacctggcccaccaccaccaaagcccgcagagcggcatagggacgacagcaggggtcttgtgcttcctgggtacaagtacctcggacccttcaacggactcgacaagggagagccggtcaacgaggcagacgccgcggccctcgagcacgacaaagcctacgaccggcagctcgacagcggagacaacccgtacctcaagtacaaccacgccgacgcggagtttcaggagcgccttaaagaagatacgtcttttgggggcaacctcggacgagcagtcttccaggcgaaaaagagggttcttgaacctctgggcctggttgaggaacctgttaagacggctccgggaaaaaagaggccggtagagcactctcctgtggagccagactcctcctcgggaaccggaaaggcgggccagcagcctgcaagaaaaagattgaattttggtcagactggagacgcagactcagtacctgacccccagcctctcggacagccaccagcagccccctctggtctgggaactaatacgatggctacaggcagtggcgcaccaatggcagacaataacgagggcgccgacggagtgggtaattcctcgggaaattggcattgcgattccacatggatgggcgacagagtcatcaccaccagcacccgaacctgggccctgcccacctacaacaaccacctctacaaacaaatttccagccaatcaggagcctcgaacggcaatcactactttggctacagcaccccttgggggtattttgacttcaacagattccactgccacttttcaccacgtgactggcaaagactcatcaacaacaactggggattccgacccaagagactcaacttcaagctctttaacattcaagtcaaagaggtcacgcagaatgacggtacgacgacgattgccaataaccttaccagcacggttcaggtgtttactgactcggagtaccagctcccgtacgtcctcggctcggcgcatcaaggatgcctcccgccgttcccagcagacgtcttcatggtgccacagtatggatacctcaccctgaacaacgggagtcaggcagtaggacgctcttcattttactgcctggagtactttccttctcagatgctgcgtaccggaaacaactttaccttcagctacacttttgaggacgttcctttccacagcagctacgctcacagccagagtctggaccgtctcatgaatcctctcatcgaccagtacctgtattacttgagcagaacaaacactccaagtggaaccaccacgcagtcaaggcttcagttttctcaggccggagcgagtgacattcgggaccagtctaggaactggcttcctggaccctgttaccgccagcagcgagtatcaaagacatctgcggataacaacaacagtgaatactcgtggactggagctaccaagtaccacctcaatggcagagactctctggtgaatccgggcccggccatggcaagccacaaggacgatgaagaaaagttttttcctcagagcggggttctcatctttgggaagcaaggctcagagaaaacaaatgtggacattgaaaaggtcatgattacagacgaagaggaaatcaggacaaccaatcccgtggctacggagcagtatggttctgtatctaccaacctccagaggggcaacagacaagcagctaccgcagatgtcaacacacaaggcgttcttccaggcatggtctggcaggacagagatgtgtaccttcaggggcccatctgggcaaagattccacacacggacggacattttcacccctctcccctcatgggtggattcggacttaaacaccctcctccacagattctcatcaagaacaccccggtacctgcgaatccttcgaccaccttcagtgcggcaaagtttgcttccttcatcacacagtactccacgggacaggtcagcgtggagatcgagtgggagctgcagaaggaaaacagcaaacgctggaatcccgaaattcagtacacttccaactacaacaagtctgttaatgtggactttactgtggacactaatggcgtgtattcagagcctcgccccattggcaccagatacctgactcgtaatctgtaa

SEQ ID NO: 4357 - DNA, 2208 bp, Artificial Sequence
  source: /note="Description of Artificial Sequence: Synthetic polynucleotide"
atggctgccgatggttatcttccagattggctcgaggacactctctctgaaggaataagacagtggtggaagctcaaacctggcccaccaccaccaaagcccgcagagcggcataaggacgacagcaggggtcttgtgcttcctgggtacaagtacctcggacccttcaacggactcgacaagggagagccggtcaacgaggcagacgccgcggccctcgagcacgacaaagcctacgaccggcagctcgacagcggagacaacccgtacctcaagtacaaccacgccgacgcggagtttcaggagcgccttaaagaagatacgtcttttgggggcaacctcggacgagcagtcttccaggcgaaaaagagggttcttgaacctctgggcctggttgaggaacctgttaagacggctccgggaaaaaagaggccggtagagcactctcctgtggagccagactcctcctcgggaaccggaaaggcgggccagcagcctgcaagaaaaagattgaattttggtcagactggagacgcagactcagtacctgacccccagcctctcggacagccaccagcagccccctctggtctgggaactaatacgatggctacaggcagtggcgcaccaatggcagacaataacgagggcgccgacggagtgggtaattcctcgggaaattggcattgcgattccacatggatgggcgacagagtcatcaccaccagcacccgaacctgggccctgcccacctacaacaaccacctctacaaacaaatttccagccaatcaggagcctcgaacgacaatcactactttggctacagcaccccttgggggtattttgacttcaacagattccactgccacttttcaccacgtgactggcaaagactcatcaacaacaactggggattccgacccaagagactcaacttcaagctctttaacattcaagtcaaagaggtcacgcagaatgacggtacgacgacgattgccaataaccttaccagcacggttcaggtgtttactgactcggagtaccagctcccgtacgtcctcggctcggcgcatcaaggatgcctcccgccgttcccagcagacgtcttcatggtgccacagtatggatacctcaccctgaacaacgggagtcaggcagtaggacgctcttcattttactgcctggagtactttccttctcagatgctgcgtaccggaaacaactttaccttcagctacacttttgaggacgttcctttccacagcagctacgctcacagccagagtctggaccgtctcatgaatcctctcatcgaccagtacctgtattacttgagcagaacaaacactccaagtggaaccaccacgcagtcaaggcttcagttttctcaggccggagcgagtgacattcgggaccagtctaggaactggcttcctggaccctgttaccgccagcagcgagtatcaaagacatctgcggataacaacaacagtgaatactcgtggactggagctaccaagtaccacctcaatggcagagactctctggtgaatccgggcccggccatggcaagccacaaggacgatgaagaaaagttttttcctcagagcggggttctcatctttgggaagcaaggctcagagaaaacaaatgtggacattgaaaaggtcatgactacagacgaagaggaaatcaggacaaccaatcccgtggctacggagcagtatggttctgtatctaccaacctccagaggggcaacagacaagcagctaccgcagatgtcaacacacaaggcgttcttccaggcatggtctggcaggacagagatgtgtaccttcaggggcccatctgggcaaagattccacacacggacggacattttcacccctctcccctcatgggtggattcggacttaaacaccctcctccacagattctcatcaagaacaccccggtacctgcgaatccttcgaccaccttcagtgcggcaaagtttgcttccttcatcacacagtactccacgggacaggtcagcgtggagatcgagtgggagctgcagaaggaaaacagcaaacgctggaatcccgaaattcagtacacttccaactacaacaagtctgttaatgtggactttactgtggacactaatggcgtgtattcagagcctcgccccattggcaccagatacctgactcgtaatctgtaa

SEQ ID NO: 4358 - DNA, 2208 bp, Artificial Sequence
  source: /note="Description of Artificial Sequence: Synthetic polynucleotide"
atggctgccgatggttatcttccagattggctcgaggacactctctctgaaggaataagacagtggtggaagctcaaacctggcccaccaccaccaaagcccgcagagcggcataaggacgacagcaggggtcttgtgcttcctgggtacaagtacctcggacccttcaacggactcgacaagggagagccggtcaacgaggcagacgccgcggccctcgagcacgacaaagcctacgaccggcagctcgacagcggagacaacccgtacctcaagtacaaccacgccgacgcggagtttcaggagcgccttaaagaagatacgtcttttgggggcaacctcggacgagcagtcttccaggcgaaaaagagggttcttgaacctccgggcctggttgaggaacctgttaagacggctccgggaaaaaagaggccggtagagcactctcctgtggagccagactcctcctcgggaaccggaaaggcgggccagcagcctgcaagaaaaagattgaattttggtcagactggagacgcagactcagtacctgacccccagcctctcggacagccaccagcagccccctctggtctgggaactaatacgatggctacaggcagtggcgcaccaatggcagacaataacgagggcgccgacggagtgggtaattcctcgggaaattggcattgcgattccacatggatgggcgacagagtcatcaccaccagcacccgaacctgggccctgcccacctacaacaaccacctctacaaacaaatttccagccaatcaggagcctcgaacgacaatcactactttggctacagcaccccttgggggtattttgacttcaacagattccactgccacttttcaccacgtgactggcaaagactcatcaacaacaactggggattccgacccaagagactcaacttcaagctctttaacattcaagtcaaagaggtcacgcagaatgacggtacgacgacgattgccaataaccttaccagcacggttcaggtgtttactgactcggagtaccagctcccgtacgtcctcggctcggcgcatcaaggatgcctcccgccgttcccagcagacgtcttcatggtgccacagtatggatacctcaccctgaacaacgggagtcaggcagtaggacgctcttcattttactgcctggagtactttccttctcagatgctgcgtaccggaaacaactttaccttcagctacacttttgaggacgttcctttccacagcagctacgctcacagccagagtctggaccgtctcatgaatcctctcatcgaccagtacctgtattacttgagcagaacaaacactccaagtggaaccaccacgcagtcaaggcttcagttttctcaggccggagcgagtgacattcgggaccagtctaggaactggcttcctggaccctgttaccgccagcagcgagtatcaaagacatctgcggataacaacaacagtgaatactcgtggactggagctaccaagtaccacctcaatggcagagactctctggtgaatccgggcccggccatggcaagccacaaggacgatgaagaaaagttttttcctcagagcggggttctcatctttgggaagcaaggctcagagaaaacaaatgtggacattgaaaaggtcatgactacagacgaagaggaaatcaggacaaccaatcccgtggctacggagcagtatggttctgtatctaccaacctccagagaggcaacagacaagcagctaccgcagatgtcaacacacaaggcgttcttccaggcatggtctggcaggacagagatgtgtaccttcaggggcccatctgggcaaagattccacacacggacggacattttcacccctctcccctcatgggtggattcggacttaaacaccctcctccacagattctcatcaagaacaccccggtacctgcgaatccttcgaccaccttcagtgcggcaaagtttgcttccttcatcacacagtactccacgggacaggtcagcgtggagatcgagtgggagctgcagaaggaaaacagcaaacgctggaatcccgaaattcagtacacttccaactacaacaagtctgttaatgtggactttactgtggacactaatggcgtgtattcagagcctcgccccattggcaccagatacctgactcgtaatctgtaa

SEQ ID NO: 4359 - DNA, 2208 bp, Artificial Sequence
  source: /note="Description of Artificial Sequence: Synthetic polynucleotide"
atggctgccgatggttatcttccagattggctcgaggacactctctctgaaggaataagacagtggtggaagctcaaacctggcccaccaccaccaaagcccgcagagcggcataaggacgacagcaggggtcttgtgcttcctgggtacaagtacctcggacccttcaacggactcgacaagggagagccggtcaacgaggcagacgccgcggccctcgagcacgacaaagcctacgaccggcagctcgacagcggagacaacccgtacctcaagtacaaccacgccgacgcggagtttcaggagcgccttaaagaagatacgtcttttgggggcaacctcggacgagcagtcttccaggcgaaaaagagggttcttgaacctctgggcctggttgaggaacctgttaagacggctccgggaaaaaagaggccggtagagcactctcctgtggagccagactcctcctcgggaaccggaaaggcgggccagcagcctgcaagaaaaagattgaattttggtcagactggagacgcagactcagtacctgacccccagcctctcggacagccaccagcagccccctctggtctgggaactaatacgatggctacaggcagtggcgcaccaatggcagacaataacgagggcgccgacggagtgggtaattcctcgggaaattggcattgcgattccacatggatgggcgacagagtcatcaccaccagcacccgaacctgggccctgcccacctacaacaaccacctctacaaacaaatttccagccaatcaggagcctcgaacgacaatcactactttggctacagcaccccttgggggtattttgacttcaacagattccactgccacttttcaccacgtgactggcaaagactcatcaacaacaactggggattccgacccaagagactcaacttcaagctctttaacattcaagtcaaagaggtcacgcagaatgacggtacgacgacgattgccaataaccttaccagcacggttcaggtgtttactgactcggagtaccagctcccgtacgtcctcggctcggcgcatcaaggatgcctcccgccgttcccagcagacgtcttcatggtgccacagtatggatacctcaccctgaacaacgggagtcaggcagtaggacgctcttcattttactgcctggagtactttccttctcagatgctgcgtaccggaaacaactttaccttcagctacacttttgaggacgttcctttccacagcagctacgctcacagccagagtctggaccgtctcatgaatcctctcatcgaccagtacctgtattacttgagcagaacaaacactccaagtggaaccaccacgcagtcaaggcttcagttttctcaggccggagcgagtgacattcgggaccagtctaggaactggcttcctggaccctgttaccgccagcagcgagtatcaaagacatctgcggataacaacaacagtgaatactcgtggactggagctaccaagtaccacctcaatggcagagactctctggtgaatccgggcccggccatggcaagccacaaggacgatgaagaaaagttttttcctcagagcggggttctcatctttgggaagcaaggctcagagaaaacaaatgtggacattgaaaaggtcatgactacagacgaagaggaaatcaggacaaccaatcccgtggctacggagcagtatggttctgtatctaccaacctccagagaggcaacagacaagcagctaccgcagatgtcaacacacaaggcgttcttccaggcatggtctggcaggacagagatgtgtaccttcaggggcccatctgggcaaagattccacacacggacggacattttcacccctctcccctcatgggtggattcggacttaaacaccctcctccacagattctcatcaagaacaccccggtacctgcgaatccttcgaccaccttcagtgcggcaaagtttgcttccttcatcacacagtactccacgggacaggtcagcgtggagatcgagtgggagctgcagaaggaaaacggcaaacgctggaatcccgaaattcagtacacttccaactacaacaagtctgttaatgtggactttactgtggacactaatggcgtgtattcagagcctcgccccattggcaccagatacctgactcgtaatctgtaa

SEQ ID NO: 4360 - DNA, 2208 bp, Artificial Sequence
  source: /note="Description of Artificial Sequence: Synthetic polynucleotide"
atggctgccgatggttatcttccagattggctcgaggacactctctctgaaggaataagacagtggtggaagctcaaacctggcccaccaccgccagagcccgcagagcggcacaaggacgacagtaggggtcttgtgcttcctgggtacaagtacctcggacccttcaacggactcgacaaaggagagccggtcaacgaggcagacgccgcggccctcgagcacgacaaggcctacgaccggcagctcgacagcggagacaacccgtacctcaagtacaaccacgccgacgcggagtttcaggagcgtcttaaagaagatacgtcttttgggggcaacctcggacgagcagtattccaggcgaaaaagagggttcttgaacctctgggcctggttgaggagcctgttaagacggctccgggaaaaaagaggccggtagagcactctcctgtggagccagactcctcctcgggaaccggaaaagcgggccagcagcctgcaagaaaaagattgaattttggtcagactggagacgcagactccgtacctgacccccagcctctcggacagccaccagcagcccccacaagtttgggatctactacaatggctacaggcagtggcgcaccaatggcagacaataacgagggtgccgatggagtgggtaattcctcaggaaattggcattgcgattcccaatggctgggcgacagagtcatcaccaccagcacccgaacctgggccctgcccacctacaacaaccacctctacaagcaaatctccagccaatcaggagcatcgaacgacaaccactactttggccacagcaccccttgggggtattttgacttcaacagattccactgtcacttctccccacgtgactggcaaagactcatcaacaacaactggggattccgacccaagagactcaacttcaagctctttaacattcaagtcaaagaggtcacgcagaatgacggtacgacgacgattgccaataaccttaccagcacggttcaggtgtttactgactcggagtaccagctcccgtacgtcctcggctcggcgcatcaaggatgcctcccgccgttcccagcagacgtcttcatggtcccacagtatggatacctcaccctgaacaacgggagtcaggcggtaggacgctcttccttttactgcctggagtactttccttctcagatgcttcgtaccggaaacaactttaccttcagctacacctttgaagacgtgcctttccacagtagctacgctcacagccagagtctggatcggctgatgaatcctcttatcgaccagtacctgtattatctaaacaaaacacaatcaaatagtggaactcttcagcagtctcggctactgtttagtcaagctggacccaccagcatgtctcttcaagctaaaaactggctgcctggaccttgctacagacaacagcgtctgtcaaagcaggcaaacgacaacaacaacagcaactttccctggactgcggctacaaagtatcatctaaatggccgggactcgttggttaatccaggaccagctatggccagccacaaagacgatgaagaaaagtttttccccatgcatggaaccctgatatttggtaaacaaggaacaaatgctaacgacgcggatttggacaatgtcatgattacagatgaagaagaaatccgcaccaccaatcccgtggctacggagcagtacgggactgtgtcaaataatttgcaaaactcaaatactggtccaactactggaactgtcaatcaccaaggagcgttacctggtatggtgtggcaggatcgagacgtgtacctgcagggacccatttgggccaagattcctcacaccgatggacactttcatccttctccactgatgggaggttttggactcaaacacccgcctcctcagatcatgatcaaaaacactcccgttccagccaatcctcctacaaacttcagttctgccaagtttgcttccttcatcacacagtattccacgggacaagtcagcgtggagattgagtgggagctgcagaaggagaacagcaaacgctggaaccccgagatccagtacacttccaactacaacaaatctgttaatgtggactttactgtggacactaatggcgtgtattcagagcctcgccccattggcaccagatacctgactcgtaatctgtaa

SEQ ID NO: 4361 - DNA, 2208 bp, Artificial Sequence
  source: /note="Description of Artificial Sequence: Synthetic polynucleotide"
atggctgccgatggttatcttccagattggctcgaggacactctctctgaaggaataagacagtggtggaagctcaaacctggcccaccaccgccaaagcccgcagagcggcacaaggacgacagtaggggtcttgtgcttcctgggtacaagtacctcggacccttcaacggactcgacaaaggagagccggtcaacgaggcagacgccgcggccctcgagcacgacaaggcctacgaccggcagctcgacagcggagacaacccgtacctcaagtacaaccacgccgacgcggagtttcaggagcgtcttaaagaagatacgtcttttgggggcaacctcggacgagcagtattccaggcgaaaaagagggttcttgaacctctgggcctggttgaggagcctgttaagacggctccgggaaaaaagaggccggtagagcactctcctgtggagccagactcctcctcgggaaccggaaaagcgggccagcagcctgcaagaaaaagattgaattttggtcagactggagacgcagactccgtacctgacccccagcctctcggacagccaccagcagcccccacaagtttgggatctactacaatggctacaggcagtggcgcaccaatggcagacaataacgagggtgccgatggagtgggtaattcctcaggaaattggcattgcgattcccaatggctgggcgacagagtcatcaccaccagcacccgaacctgggccctgcccacctacaacaaccacctctacaagcaaatctccagccaatcaggagcatcgaacgacaaccactactttggccacagcaccccttgggggtattttgacttcaacagattccactgtcacttctccccacgtgactggcaaagactcatcaacaacaactggggattccgacccaagagactcaacttcaagctctttaacattcaagtcaaagaggtcacgcagaatgacggtacgacgacgattgccaataaccttaccagcacggttcaggtgtttactgactcggagtaccagctcccgtacgtcctcggctcggcgcatcaaggatgcctcccgccgttcccagcagacgtcttcatggtctcacagtatggatacctcaccctgaacaacgggagtcaggcggtaggacgctcttccttttactgcctggagtactttccttctcagatgcttcgtaccggaaacaactttaccttcagctacacctttgaagacgtgcctttccacagtagctacgctcacagccagagtctggatcggctgatgaatcctcttatcgaccagtacctgtattatctaaacaaaacacaatcaaatagtggaactcttcagcagtctcggctactgtttagtcaagctggacccaccagcatgtctcttcaagctaaaaactggctgcctggaccttgctacagacaacagcgtctgtcaaagcaggcaaacgacaacaacaacagcaactttccctggactgcggctacaaagtatcatctaaatggccgggactcgttggttaatccaggaccagctatggccagccacaaagacgatgaagaaaagtttttccccatgcatggaaccctgatatttggtaaacaaggaacaaatgctaacgacgcggatttggacaatgtcatgattacagatgaagaagaaatccgcaccaccaatcccgtggctacggagcagtacgggactgtgtcaaataatttgcaaaactcaaatactggtccaactactggaactgtcaatcaccaaggagcgttacctggtatggtgtggcaggatcgagacgtgtacctgcagggacccatttgggccaagattcctcacaccgatggacactttcatccttctccactgatgggaggttttggactcaaacacccgcctcctcagatcatgatcaaaaacactcccgttccagccaatcctcctacaaacttcagttctgccaagtttgcttccttcatcacacagtattccacgggacaagtcagcgtggagattgagtgggagctgcagaaggagaacagcaaacgctggaaccccgagatccagtacacttccaactacaacaaatctgttaatgtggactttactgtggacactaatggcgtgtattcagagcctcgccccattggcaccagatacctgactcgtaatctgtaa

SEQ ID NO: 4362 - DNA, 2208 bp, Artificial Sequence
  source: /note="Description of Artificial Sequence: Synthetic polynucleotide"
atggctgccgatggttatcttccagattggctcgaggacactctctctgaaggaataagacagtggtggaagctcaaacctggcccaccaccgccaaagcccgcagagcggcacaaggacgacagtaggggtcttgtgcttcctgggtacaagtacctcggacccttcaacggactcgacaaaggagagccggtcaacgaggcagacgccgcggccctcgagcacgacaaggcctacgaccggcagctcgacagcggagacaacccgtacctcaagtacaaccacgccgacgcggagtttcaggagcgtcttaaagaagatacgtcttttgggggcaacctcggacgagcagtattccaggcgaaaaagagggttcttgaacctctgggcctggttgaggagcctgttaagacggctccgggaaaaaagaggccggtagagcactctcctgtggagccagactcctcctcgggaaccggaaaagcgggccagcagcctgcaagaaaaagattgaattttggtcagactggagacgcagactccgtacctgacccccagcctctcggacagccaccagcagcccccacaagtttgggatctactacaatggctacaggcagtggcgcaccaatggcagacaataacgagggtgccgatggagtgggtaattcctcaggaaattggcattgcgattcccaatggctgggcgacagagtcatcaccaccagcacccgaacctgggccctgcccacctacaacaaccacctctacaagcaaatctccagccaatcaggagcatcgaacgacaaccactactttggccacagcaccccttgggggtattttgacttcaacagattccactgtcacttctccccacgtgactggcaaagactcatcaacaacaactggggattccgacccaagagactcaacttcaagctctttaacattcaagtcaaagaggtcacgcagaatgacggtacgacgacgattgccaataaccttaccagcacggttcaggtgtttactgactcggagtaccagctcccgtacgtcctcggctcggcgcatcaaggatgcctcccgccgttcccagcagacgtcttcatggtctcacagtatggatacctcaccctgaacaacgggagtcaggcggtaggacgctcttccttttactgcctggagtactttccttctcagatgcttcgtaccggaaacaactttaccttcagctacacctttgaagacgtgcctttccacagtagctacgctcacagccagagtctggatcggctgatgaatcctcttatcgaccagtacctgtattatctaaacaaaacacaatcaaatagtggaactcttcagcagtctcggctactgtttagtcaagctggacccaccagcatgtctcttcaagctaaaaactggctgcctggaccttgctacagacaacagcgtctgtcaaagcaggcaaacgacaacaacaacagcaactttccctggactgcggctacaaagtatcatctaaatggccgggactcgttggttaatccaggaccagctatggccagccacaaagacgatgaagaaaagcttttccccatgcatggaaccctgatatttggtaaacaaggaacaaatgctaacgacgcggatttggacaatgtcatgattacagatgaagaagaaatccgcaccaccaatcccgtggctacggagcagtacgggactgtgtcaaataatttgcaaaactcaaatactggtccaactactggaactgtcaatcaccaaggagcgttacctggtatggtgtggcaggatcgagacgtgtacctgcagggacccatttgggccaagattcctcacaccgatggacactttcatccttctccactgatgggaggttttggactcaaacacccgcctcctcagatcatgatcaaaaacactcccgttccagccaatcctcctacaaacttcagttctgccaagtttgcttccttcatcacacagtattccacgggacaagtcagcgtggagattgagtgggagctgcagaaggagaacagcaaacgctggaaccccgagatccagtacacttccaactacaacaaatctgttaatgtggactttactgtggacactaatggcgtgtattcagagcctcgccccattggcaccagatacctgactcgtaatctgtaa

SEQ ID NO: 4363 - DNA, 2208 bp, Artificial Sequence
  source: /note="Description of Artificial Sequence: Synthetic polynucleotide"
atggctgccgatggttatcttccagattggctcgaggacactctctctgaaggaataagacagtggtggaagctcaaacctggcccaccaccgccaaagcccgcagagcggcacaaggacgacagtaggggtcttgtgcttcctgggtacaagtacctcggacccttcaacggactcgacaaaggagagccggtcaacgaggcagacgccgcggccctcgagcacgacaaggcctacgaccggcagctcgacagcggagacaacccgtacctcaagtacaaccacgccgacgcggagtttcaggagcgtcttaaagaagatacgtcttttgggggcaacctcggacgagcagtattccaggcgaaaaagagggttcttgaacctctgggcctggttgaggagcctgttaagacggctccgggaaaaaagaggccggtagagcactctcctgtggagccagactcctcctcgggaaccggaaaagcgggccagcagcctgcaagaaaaagattgaattttggtcagactggagacgcagactccgtacctgacccccagcctctcggacagccaccagcagcccccacaagtttgggatctactacaatggctacaggcagtggcgcaccaatggcagacaataacgagggtgccgatggagtgggtaattcctcaggaaattggcattgcgattcccaatggctgggcgacagagtcatcaccaccagcacccgaacctgggccctgcccacctacaacaaccacctctacaagcaaatctccagccaatcaggagcatcgaacgacaaccactactttggccacagcaccccttgggggtattttgacttcaacagattccactgtcacttctccccacgtgactggcaaagactcatcaacaacaactggggattccgacccaagagactcaacttcaagctctttaacattcaagtcaaagaggtcacgcagaatgacggtacgacgacgattgccaataaccttaccagcacggttcaggtgtttactgactcggagtaccagctcccgtacgtcctcggctcggcgcatcaaggatgcctcccgccgttcccagcagacgtcttcatggtcccacagtatggatacctcaccctgaacaacgggagtcaggcggtaggacgctcttccttttactgcctggagtactttccttctcagatgcttcgtaccggaaacaactttaccttcagctacacctttgaagacgtgcctttccacagtagctacgctcacagccagagtctggatcggctgatgaatcctcttatcgaccagtacctgtattatctaaacaaaacacaatcaaatagtggaactcttcagcagtctcggctactgtttagtcaagctggacccaccagcatgtctcttcaagctaaaaactggctgcctggaccttgctacagacaacagcgtctgtcaaagcaggcaaacgacaacaacaacagcaacttttcctggactgcggctacaaagtatcatctaaatggccgggactcgttggttaatccaggaccagctatggccagccacaaagacgatgaagaaaagtttttccccatgcatggaaccctgatatttggtaaacaaggaacaaatgctaacgacgcggatttggacaatgtcatgattacagatgaagaagaaatccgcaccaccaatcccgtggctacggagcagtacgggactgtgtcaaataatttgcaaaactcaaatactggtccaactactggaactgtcaatcaccaaggagcgttacctggtatggtgtggcaggatcgagacgtgtacctgcagggacccatttgggccaagattcctcacaccgatggacactttcatccttctccactgatgggaggttttggactcaaacacccgcctcctcagatcatgatcaaaaacactcccgttccagccaatcctcctacaaacttcagttctgccaagtttgcttccttcatcacacagtattccacgggacaagtcagcgtggagattgagtgggagctgcagaaggagaacagcaaacgctggaaccccgagatccagtacacttccaactacaacaaatctgttaatgtggactttactgtggacactaatggcgtgtattcagagcctcgccccattggcaccagatacctgactcgtaatctgtaa

SEQ ID NO: 4364 - DNA, 2208 bp, Artificial Sequence
  source: /note="Description of Artificial Sequence: Synthetic polynucleotide"
atggctgccgatggttatcttccagattggctcgaggacactctctctgaaggaataagacagtggtggaagctcaaacctggcccaccaccgccaaagcccgcagagcggcacaaggacgacagtaggggtcttgtgcttcctgggtacaagtacctcggacccttcaacggactcgacaaaggagagccggtcaacgaggcagacgccgcggccctcgagcacgacaaggcctacgaccggcagctcgacagcggagacaacccgtacctcaagtacaaccacgccgacgcggagtttcaggagcgtcttaaagaagatacgtcttttgggggcaacctcggacgagcagtattccaggcgaaaaagagggttcttgaacctctgggcctggttgaggagcctgttaagacggctccgggaaaaaagaggccggtagagcactctcctgtggagccagactcctcctcgggaaccggaaaagcgggccagcagcctgcaagaaaaagattgaattttggtcagactggagacgcagactccgtacctgacccccagcctctcggacagccaccagcagcccccacaagtttgggatctactacaatggctacaggcagtggcgcaccaatggcagacaataacgagggtgccgatggagtgggtaattcctcaggaaattggcattgcgattcccaatggctgggcgacagagtcatcaccaccagcacccgaacctgggccctgcccacctacaacaaccacctctacaagcaaatctccagccaatcaggagcatcgaacgacaaccactactttggccacagcaccccttgggggtattttgacttcaacagattccactgtcacttctccccacgtgactggcaaagactcatcaacaacaactggggattccgacccaagagactcaacttcaagctctttaacattcaagtcaaagaggtcacgcagaatgacggtacgacgacgattgccaataaccttaccagcacggttcaggtgtttactgactcggagtaccagctcccgtacgtcctcggctcggcgcatcaaggatgcctcccgccgttcccagcagacgtcttcatggtcccacagtatggatacctcaccctgaacaacgggagtcaggcggtaggacgctcttccttttactgcctggagtactttccttctcagatgcttcgtaccggaaacaactttaccttcagctacacctttgaagacgtgcctttccacagtagctacgctcacagccagagtctggatcggctgatgaatcctcttatcgaccagtacctgtattatctaaacaaaacacaatcaaatagtggaactcttcagcagtctcggctactgtttagtcaagctggacccaccagcatgtctcttcaagctaaaaactggctgcctggaccttgctacagacaacagcgtctgtcaaagcaggcaaacgacaacaacaacagcaactttccctggactgcggctacaaagtatcatctaaatggccgggactcgttggttaatccaggaccagctatggccagccacaaagacgatgaagaaaagtttttccccatgcatggaaccctgatatttggtaaacaaggaacaaatgctaacgacgcggatttggacaatgtcatgattacagatgaagaagaaatccgcaccaccaatcccttggctacggagcagtacgggactgtgtcaaataatttgcaaaactcaaatactggtccaactactggaactgtcaatcaccaaggagcgttacctggtatggtgtggcaggatcgagacgtgtacctgcagggacccatttgggccaagattcctcacaccgatggacactttcatccttctccactgatgggaggttttggactcaaacacccgcctcctcagatcatgatcaaaaacactcccgttccagccaatcctcctacaaacttcagttctgccaagtttgcttccttcatcacacagtattccacgggacaagtcagcgtggagattgagtgggagctgcagaaggagaacagcaaacgctggaaccccgagatccagtacacttccaactacaacaaatctgttaatgtggactttactgtggacactaatggcgtgtattcagagcctcgccccattggcaccagatacctgactcgtaatctgtaa

SEQ ID NO: 4365 - DNA, 2208 bp, Artificial Sequence
  source: /note="Description of Artificial Sequence: Synthetic polynucleotide"
atggctgccgatggttatcttccagattggctcgaggacactctctctgaaggaataagacagtggtggaagctcaaacctggcccaccaccgccaaagcccgcagagcggcacaaggacgacagtaggggtcttgtgcttcctgggtacaagtacctcggacccttcaacggactcgacaaaggagagccggtcaacgaggcagacgccgcggccctcgagcacgacaaggcctacgaccggcagctcgacagcggagacaacccgtacctcaagtacaaccacgccgacgcggagtttcaggagcgtcttaaagaagatacgtcttttgggggcaacctcggacgagcagtattccaggcgaaaaagagggttcttgaacctctgggcctggttgaggagcctgttaagacggctccgagaaaaaagaggccggtagagcactctcctgtggagccagactcctcctcgggaaccggaaaagcgggccagcagcctgcaagaaaaagattgaattttggtcagactggagacgcagactccgtacctgacccccagcctctcggacagccaccagcagcccccacaagtttgggatctactacaatggctacaggcagtggcgcaccaatggcagacaataacgagggtgccgatggagtgggtaattcctcaggaaattggcattgcgattcccaatggctgggcgacagagtcatcaccaccagcacccgaacctgggccctgcccacctacaacaaccacctctacaagcaaatctccagccaatcaggagcatcgaacgacaaccactactttggccacagcaccccttgggggtattttgacttcaacagattccactgtcacttctccccacgtgactggcaaagactcatcaacaacaactggggattccgacccaagagactcaacttcaagctctttaacattcaagtcaaagaggtcacgcagaatgacggtacgacgacgattgccaataaccttaccagcacggttcaggtgtttactgactcggagtaccagctcccgtacgtcctcggctcggcgcatcaaggatgcctcccgccgttcccagcagacgtcttcatggtcccacagtatggatacctcaccctgaacaacgggagtcaggcggtaggacgctcttccttttactgcctggagtactttccttctcagatgcttcgtaccggaaacaactttaccttcagctacacctttgaagacgtgcctttccacagtagctacgctcacagccagagtctggatcggctgatgaatcctcttatcgaccagtacctgtattatctaaacaaaacacaatcaaatagtggaactcttcagcagtctcggctactgtttagtcaagctggacccaccagcatgtctcttcaagctaaaaactggctgcctggaccttgctacagacaacagcgtctgtcaaagcaggcaaacgacaacaacaacagcaactttccctggactgcggctacaaagtatcatctaaatggccgggactcgttggttaatccaggaccagctatggccagccacaaagacgatgaagaaaagtttttccccatgcatggaaccctgatatttggtaaacaaggaacaaatgctaacgacgcggatttggacaatgtcatgattacagatgaagaagaaatccgcaccaccaatcccgtggctacggagcagtacgggactgtgtcaaataatttgcaaaactcaaatactggtccaactactggaactgtcaatcaccaaggagcgttacctggtatggtgtggcaggatcgagacgtgtacctgcagggacccatttgggccaagattcctcacaccgatggacactttcatccttctccactgatgggaggttttggactcaaacacccgcctcctcagatcatgatcaaaaacactcccgttccagccaatcctcctacaaacttcagttctgccaagtttgcttccttcatcacacagtattccacgggacaagtcagcgtggagattgagtgggagctgcagaaggagaacagcaaacgctggaaccccgagatccagtacacttccaactacaacaaatctgttaatgtggactttactgtggacactaatggcgtgtattcagagcctcgccccattggcaccagatacctgactcgtaatctgtaa

SEQ ID NO: 4366 - DNA, 2208 bp, Artificial Sequence
  source: /note="Description of Artificial Sequence: Synthetic polynucleotide"
atggctgccgatggttatcttccagattggctcgaggacactctctctgaaggaataagacagtggtggaagctcaaacctggcccaccaccgccaaagcccgcagagcggcacaaggacgacagtaggggtcttgtgcttcctgggtacaagtacctcggacccttcaacggactcgacaaaggagagccggtcaacgaggcagacgccgcggccctcgagcacgacaaggcctacgaccggcagctcgacagcggagacaacccgtacctcaagtacaaccacgccgacgcggagtttcaggagcgtcttaaagaagatacgtcttttgggggcaacctcggacgagcagtattccaggcgaaaaagagggttcttgaacctctgggcctggttgaggagcctgttaagacggctccgggaaaaaagaggccggtagagcactctcctgtggagccagactcctcctcgggaaccggaaaagcgggccagcagcctgcaagaaaaagattgaattttggtcagactggagacgcagactccgtacctgacccccagcctctcggacagccaccagcagcccccacaagtttgggatctactacaatggctacaggcagtggcgcaccaatggcagacaataacgagggtgccgatggagtgggtaattcctcaggaaattggcattgcgattcccaatggctgggcgacagagtcatcaccaccagcacccgaacctgggccctgcccacctacaacaaccacctctacaagcaaatctccagccaatcaggagcatcgaacgacaaccactactttggccacagcaccccttgggggtattttgacttcaacagattccactgtcacttctccccacgtgactggcaaagactcatcaacaacaactggggattccgacccaagagactcaacttcaagctctttaacattcaagtcaaagaggtcacgcagaatgacggtacgacgacgattgccaataaccttaccagcacggttcaggtgtttactgactcggagtaccagctcccgtacgtcctcggctcggcgcatcaaggatgcctcccgccgttcccagcagacgtcttcatggtcccacagtatggatacctcaccctgaacaacgggagtcaggcggtaggacgctcttccttttactgcctggagtactttccttctcagatgcttcgtaccggaaacaactttaccttcagctacacctttgaagacgtgcctttccacagtagctacgctcacagccagagtctggatcggctgatgaatcctcttatcgaccagtacctgtattatctaaacaaaacacaatcaaatagtggaactcttcagcagtctcggctactgtttagtcaagctggacccaccagcatgtctcttcaagctaaaaactggctgcctggaccttgctacagacaacagcgtctgtcaaagcaggcaaacgacaacaacaacagcaactttccctggactgcggctacaaagtatcatctaaatggccgggactcgttggttaatccaggaccagctatggccagccacaaagacgatgaagaaaagtttttccccatgcatggaaccctgatatttggtaaacaaggaacaaatgctaacgacgcggatttggacaatgtcatgattacagatgaagaagaaatccgcaccaccaatcccgtggctacggagcagtacgggactgtgtcaaataatttgcaaaactcaaatactggtccaactactggaactgtcaatcaccaaggagcgttacctggtatggtgtggcaggatcgagacgtgtacctgcagggacccatttgggccaagattcctcacaccgatggacgctttcatccttctccactgatgggaggttttggactcaaacacccgcctcctcagatcatgatcaaaaacactcccgttccagccaatcctcctacaaacttcagttctgccaagtttgcttccttcatcacacagtattccacgggacaagtcagcgtggagattgagtgggagctgcagaaggagaacagcaaacgctggaaccccgagatccagtacacttccaactacaacaaatctgttaatgtggactttactgtggacactaatggcgtgtattcagagcctcgccccattggcaccagatacctgactcgtaatctgtaa

SEQ ID NO: 4367 - DNA, 2208 bp, Artificial Sequence
  source: /note="Description of Artificial Sequence: Synthetic polynucleotide"
atggctgccgatggttatcttccagattggctcgaggacactctctctgaaggaataagacagtggtggaagctcaaacctggcccaccaccgccaaagcccgcagagcggcacaaggacgacagtaggggtcttgtgcttcctgggtacaagtacctcggacccttcaacggactcgacaaaggagagccggtcaacgaggcagacgccgcggccctcgagcacgacaaggcctacgaccggcagctcgacagcggagacaacccgtacctcaagtacaaccacgccgacgcggagtttcaggagcgtcttaaagaagatacgtcttttgggggcaacctcggacgagcagtattccaggcgaaaaagagggttcttgaacctctgggcctggttgaggagcctgttaagacggctccgggaaaaaagaggccggtagagcactctcctgtggagccagactcctcctcgggaaccggaaaagcgggccagcagcctgcaagaaaaagattgaattttggtcagactggagacgcagactccgtacctgacccccagcctctcggacagccaccagcagcccccacaagtttgggatctactacaatggctacaggcagtggcgcaccaatggcagacaataacgagggtgccgatggagtgggtaattcctcaggaaattggcattgcgattcccaatggctgggcgacagagtcatcaccaccagcacccgaacctgggccctgcccacctacagcaaccacctctacaagcaaatctccagccaatcaggagcatcgaacgacaaccactactttggccacagcaccccttgggggtattttgacttcaacagattccactgtcacttctccccacgtgactggcaaagactcatcaacaacaactggggattccgacccaagagactcaacttcaagctctttaacattcaagtcaaagaggtcacgcagaatgacggtacgacgacgattgccaataaccttaccagcacggttcaggtgtttactgactcggagtaccagctcccgtacgtcctcggctcggcgcatcaaggatgcctcccgccgctcccagcagacgtcttcatggtcccacagtatggatacctcaccctgaacaacgggagtcaggcggtaggacgctcttccttttactgcctggagtactttccttctcagatgcttcgtaccggaaacaactttaccttcagctacacctttgaagacgtgcctttccacagtagctacgctcacagccagagtctggatcggctgatgaatcctcttatcgaccagtacctgtattatctaaacaaaacacaatcaaatagtggaactcttcagcagtctcggctactgtttagtcaagctggacccaccagcatgtctcttcaagctaaaaactggctgcctggaccttgctacagacaacagcgtctgtcaaagcaggcaaacgacaacaacaacagcaactttccctggactgcggctacaaagtatcatctaaatggccgggactcgttggttaatccaggaccagctatggccagccacaaagacgatgaagaaaagtttttccccatgcatggaaccctgatatttggtaaacaaggaacaaatgctaacgacgcggatttggacaatgtcatgattacagatgaagaagaaatccgcaccaccaatcccgtggctacggagcagtacgggactgtgtcaaataatttgcaaaactcaaatactggtccaactactggaactgtcaatcaccaaggagcgttacctggtatggtgtggcaggatcgagacgtgtacctgcagggacccatttgggccaagattcctcacaccgatggacactttcatccttctccactgatgggaggttttggactcaaacacccgcctcctcagatcatgatcaaaaacactcccgttccagccaatcctcctacaaacttcagttctgccaagtttgcttccttcatcacacagtattccacgggacaagtcagcgtggagattgagtgggagctgcagaaggagaacagcaaacgctggaaccccgagatccagtacacttccaactacaacaaatctgttaatgtggactttactgtggacactaatggcgtgtattcagagcctcgccccattggcaccagatacctgactcgtaatctgtaa

SEQ ID NO: 4368 - DNA, 2208 bp, Artificial Sequence
  source: /note="Description of Artificial Sequence: Synthetic polynucleotide"
atggctgccgatggttatcttccagattggctcgaggacactctctctgaaggaataagacagtggtggaagctcaaacctggcccaccaccgccaaagcccgcagagcggcacaaggacgacagtaggggtcttgtgcttcctgggtacaagtacctcggacccttcaacggactcgacaaaggagagccggtcaacgaggcagacgccgcggccctcgagcacgacaaggcctacgaccggcagctcgacagcggagacaacccgtacctcaagtacaaccacgccgacgcggagtttcaggagcgtcttaaagaagatacgtcttttgggggcaacctcggacgagcagtattccaggcgaaaaagagggttcttgaacctctgggcctggttgaggagcctgttaagacggctccgggaaaaaagaggccggtagagcactctcctgtggagccagactcctcctcgggaaccggaaaagcgggccagcagcctgcaagaaaaagattgaattttggtcagactggaggcgcagactccgtacctgacccccagcctctcggacagccaccagcagcccccacaagtttgggatctactacaatggctacaggcagtggcgcaccaatggcagacaataacgagggtgccgatggagtgggtaattcctcaggaaattggcattgcgattcccaatggctgggcgacagagtcatcaccaccagcacccgaacctgggccctgcccacctacaacaaccacctctacaagcaaatctccagccaatcaggagcatcgaacgacaaccactactttggccacagcaccccttgggggtattttgacttcaacagattccactgtcacttctccccacgtgactggcaaagactcatcaacaacaactggggattccgacccaagagactcaacttcaagctctttaacattcaagtcaaagaggtcacgcagaatgacggtacgacgacgattgccaataaccttaccagcacggttcaggtgtttactgactcggagtaccagctcccgtacgtcctcggctcggcgcatcaaggatgcctcccgccgttcccagcagacgtcttcatggtcccacagtatggatacctcaccctgaacaacgggagtcaggcggtaggacgctcttccttttactgcctggagtactttccttctcagatgcttcgtaccggaaacaactttaccttcagctacacctttgaagacgtgcctttccacagtagctacgctcacagccagagtctggatcggctgatgaatcctcttatcgaccagtacctgtattatctaaacaaaacacaatcaaatagtggaactcttcagcagtctcggctactgtttagtcaagctggacccaccagcatgtctcttcaagctaaaaactggctgcctggaccttgctacagacaacagcgtctgtcaaagcaggcaaacgacaacaacaacagcaactttccctggactgcggctacaaagtatcatctaaatggccgggactcgttggttaatccaggaccagctatggccagccacaaagacgatgaagaaaagtttttccccatgcatggaaccctgatatttggtaaacaaggaacaaatgctaacgacgcggatttggacaatgtcatgattacagatgaagaagaaatccgcaccaccaatcccgtggctacggagcagtacgggactgtgtcaaataatttgcaaaactcaaatactggtccaactactggaactgtcaatcaccaaggagcgttacctggtatggtgtggcaggatcgagacgtgtacctgcagggacccatttgggccaagattcctcacaccgatggacactttcatccttctccactgatgggaggttttggactcaaacacccgcctcctcagatcatgatcaaaaacactcccgttccagccaatcctcctacaaacttcagttctgccaagtttgcttccttcatcacacagtattccacgggacaagtcagcgtggagattgagtgggagctgcagaaggagaacagcaaacgctggaaccccgagatccagtacacttccaactacaacaaatctgttaatgtggactttactgtggacactaatggcgtgtattcagagcctcgccccattggcaccagatacctgactcgtaatctgtaa

SEQ ID NO: 4369 - DNA, 2208 bp, Artificial Sequence
  source: /note="Description of Artificial Sequence: Synthetic polynucleotide"
atggctgccgatggttatcttccagattggctcgaggacactctctctgaaggaataagacagtggtggaagctcaaacctggcccaccaccgccaaagcccgcagagcggcacaaggacgacagtaggggtcttgtgcttcctgggtacaagtacctcggacccttcaacggactcgacaaaggagagccggtcaacgaggcagacgccgcggccctcgagcacggcaaggcctacgaccggcagctcgacagcggagacaacccgtacctcaagtacaaccacgccgacgcggagtttcaggagcgtcttaaagaagatacgtcttttgggggcaacctcggacgagcagtattccaggcgaaaaagagggttcttgaacctctgggcctggttgaggagcctgttaagacggctccgggaaaaaagaggccggtagagcactctcctgtggagccagactcctcctcgggaaccggaaaagcgggccagcagcctgcaagaaaaagattgaattttggtcagactggagacgcagactccgtacctgacccccagcctctcggacagccaccagcagcccccacaagtttgggatctactacaatggctacaggcagtggcgcaccaatggcagacaataacgagggtgccgatggagtgggtaattcctcaggaaattggcattgcgattcccaatggctgggcgacagagtcatcaccaccagcacccgaacctgggccctgcccacctacaacaaccacctctacaagcaaatctccagccaatcaggagcatcgaacgacaaccactactttggccacagcaccccttgggggtattttgacttcaacagattccactgtcacttctccccacgtgactggcaaagactcatcaacaacaactggggattccgacccaagagactcaacttcaagctctttaacattcaagtcaaagaggtcacgcagaatgacggtacgacgacgattgccaataaccttaccagcacggttcaggtgtttactgactcggagtaccagctcccgtacgtcctcggctcggcgcatcaaggatgcctcccgccgttcccagcagacgtcttcatggtcccacagtatggatacctcaccctgaacaacgggagtcaggcggtaggacgctcttccttttactgcctggagtactttccttctcagatgcttcgtaccggaaacaactttaccttcagctacacctttgaagacgtgcctttccacagtagctacgctcacagccagagtctggatcggctgatgaatcctcttatcgaccagtacctgtattatctaaacaaaacacaatcaaatagtggaactcttcagcagtctcggctactgtttagtcaagctggacccaccagcatgtctcttcaagctaaaaactggctgcctggaccttgctacagacaacagcgtctgtcaaagcaggcaaacgacaacaacaacagcaactttccctggactgcggctacaaagtatcatctaaatggccgggactcgttggttaatccaggaccagctatggccagccacaaagacgatgaagaaaagtttttccccatgcatggaaccctgatatttggtaaacaaggaacaaatgctaacgacgcggatttggacaatgtcatgattacagatgaagaagaaatccgcaccaccaatcccgtggctacggagcagtacgggactgtgtcaaataatttgcaaaactcaaatactggtccaactactggaactgtcaatcaccaaggagcgttacctggtatggtgtggcaggatcgagacgtgtacctgcagggacccatttgggccaagattcctcacaccgatggacactttcatccttctccactgatgggaggttttggactcaaacacccgcctcctcagatcatgatcaaaaacactcccgttccagccaatcctcctacaaacttcagttctgccaagtttgcttccttcatcacacagtattccacgggacaagtcagcgtggagattgagtgggagctgcagaaggagaacagcaaacgctggaaccccgagatccagtacacttccaactacaacaaatctgttaatgtggactttactgtggacactaatggcgtgtattcagagcctcgccccattggcaccagatacctgactcgtaatctgtaa

SEQ ID NO: 4370 - DNA, 2208 bp, Artificial Sequence
  source: /note="Description of Artificial Sequence: Synthetic polynucleotide"
atggctgccgatggttatcttccagattggctcgaggacactctctctgaaggaataagacagtggtggaagctcaaacctggcccaccaccgccaaagcccgcagagcggcacaaggacgacagtaggggtcttgtgcttcctgggtacaagtacctcggacccttcaacggactcgacaaaggagagccggtcaacgaggcagacgccgcggccctcgagcacgacaaggcctacgaccggcagctcgacagcggagacaacccgtacctcaagtacaaccacgccgacgcggagtttcaggagcgtcttaaagaagatacgtcttttgggggcaacctcggacgagcagtattccaggcgaaaaagagggttcttgaacctctgggcctggttgaggagcctgttaagacggctccgggaaaaaagaggccggtagagcactctcctgtggagccagactcctcctcgggaaccggaaaagcgggccagcagcctgcaagaaaaagattgaattttggtcagactggagacgcagactccgtacctgacccccagcctctcggacagccaccagcagcccccacaagtttgggatctactacaatggctacaggcagtggcgcaccaatggcagacaataacgagggtgccgatggagtgggtaattcctcaggaaattggcattgcgattcccaatggctgggcgacagagtcatcaccaccagcacccgaacctgggccctgcccacctacaacaaccacctctacaagcaaatctccagccaatcaggagcatcgaacgacaaccactactttggccacagcaccccttgggggtattttgacttcaacagattccactgtcacttctccccacgtgaccggcaaagactcatcaacaacaactggggattccgacccaagagactcaacttcaagctctttaacattcaagtcaaagaggtcacgcagaatgacggtacgacgacgattgccaataaccttaccagcacggttcaggtgtttactgactcggagtaccagctcccgtacgtcctcggctcggcgcatcaaggatgcctcccgccgttcccagcagacgtcttcatggtcccacagtatggatacctcaccctgaacaacgggagtcaggcggtaggacgctcttccttttactgcctggagtactttccttctcagatgcttcgtaccggaaacaactttaccttcagctacacctttgaagacgtgcctttccacagtagctacgctcacagccagagtctggatcggctgatgaatcctcttatcgaccagtacctgtattatctaaacaaaacacaatcaaatagtggaactcttcagcagtctcggctactgtttagtcaagctggacccaccagcatgtctcttcaagctaaaaactggctgcctggaccttgctacagacaacagcgtctgtcaaagcaggcaaacgacaacaacaacagcaactttccctggactgcggctacaaagtatcatctaaatggccgggactcgttggttaatccaggaccagctatggccagccacaaagacgatgaagaaaagtttttccccatgcatggaaccctgatatttggtaaacaaggaacaaatgctaacgacgcggatttggacaatgtcatgattacagatgaagaagaaatccgcaccaccaatcccgtggctacggagcagtacgggactgtgtcaaataatttgcaaaactcaaatactggtccaactactggaactgtcaatcaccaaggagcgttacctggtatggtgtggcaggatcgagacgtgtacctgcagggacccatttgggccaagattcctcacaccgatggacactttcatccttctccactgatgggaggttttggactcaaacacccgcctcctcagatcatgatcaaaaacactcccgttccagccaatcctcctacaaacttcagttctgccaagtttgcttccttcatcacacagtattccacgggacaagtcagcgtggagattgagtgggagctgcagaaggagaacagcaaacgctggaaccccgagatccagtacacttccaactacaacaaatctgttaatgtggactttactgtggacactaatggcgtgtattcagagcctcgccccattggcaccagatacctgactcgtaatctgtaa

SEQ ID NO: 4371 - DNA, 2208 bp, Artificial Sequence
  source: /note="Description of Artificial Sequence: Synthetic polynucleotide"
atggctgccgatggttatcttccagattggctcgaggacactctctctgaaggaataagacagtggtggaagctcaaacctggcccaccaccgccaaagcccgcagagcggcacaaggacgacagtaggggtcttgtgcttcctgggtacaagtacctcggacccttcaacggactcgacaaaggagagccggtcaacgaggcagacgccgcggccctcgagcacgacaaggcctacgaccggcagctcgacagcggagacaacccgtacctcaagtacaaccacgccgacgcggagtttcaggagcgtcttaaagaagatacgtcttttgggggcaacctcggacgagcagtattccaggcgaaaaagagggttcttgaacctctgggcctggttgaggagcctgttaagacggctccgggaaaaaagaggccggtagagcactctcctgtggagccagactcctcctcgggaaccggaaaagcgggccagcagcctgcaagaaaaagattgaattttggtcagactggagacgcagactccgtacctgacccccagcctctcggacagccaccagcagcccccacaagtttgggatctactacaatggctacaggcagtggcgcaccaatggcagacaataacgagggtgccgatggagtgggtaattcctcaggaaattggcattgcgattcccaatggctgggcgacagagtcatcaccaccagcacccgaacctgggccctgcccacctacaacaaccacctctacaagcaaatctccagccaatcaggagcatcgaacgacaaccactactttggccacagcaccccttgggggtattttgacttcaacagattccactgtcacttctccccacgtgactggcaaagactcatcaacaacaactggggattccgacccaagagacccaacttcaagctctttaacattcaagtcaaagaggtcacgcagaatgacggtacgacgacgattgccaataaccttaccagcacggttcaggtgtttactgactcggagtaccagctcccgtacgtcctcggctcggcgcatcaaggatgcctcccgccgttcccagcagacgtcttcatggtcccacagtatggatacctcaccctgaacaacgggagtcaggcggtaggacgctcttccttttactgcctggagtactttccttctcagatgcttcgtaccggaaacaactttaccttcagctacacctttgaagacgtgcctttccacagtagctacgctcacagccagagtctggatcggctgatgaatcctcttatcgaccagtacctgtattatctaaacaaaacacaatcaaatagtggaactcttcagcagtctcggctactgtttagtcaagctggacccaccagcatgtctcttcaagctaaaaactggctgcctggaccttgctacagacaacagcgtctgtcaaagcaggcaaacgacaacaacaacagcaactttccctggactgcggctacaaagtatcatctaaatggccgggactcgttggttaatccaggaccagctatggccagccacaaagacgatgaagaaaagtttttccccatgcatggaaccctgatatttggtaaacaaggaacaaatgctaacgacgcggatttggacaatgtcatgattacagatgaagaagaaatccgcaccaccaatcccgtggctacggagcagtacgggactgtgtcaaataatttgcaaaactcaaatactggtccaactactggaactgtcaatcaccaaggagcgttacctggtatggtgtggcaggatcgagacgtgtacctgcagggacccatttgggccaagattcctcacaccgatggacactttcatccttctccactgatgggaggttttggactcaaacacccgcctcctcagatcatgatcaaaaacactcccgttccagccaatcctcctacaaacttcagttctgccaagtttgcttccttcatcacacagtattccacgggacaagtcagcgtggagattgagtgggagctgcagaaggagaacagcaaacgctggaaccccgagatccagtacacttccaactacaacaaatctgttaatgtggactttactgtggacactaatggcgtgtattcagagcctcgccccattggcaccagatacctgactcgtaatctgtaa

SEQ ID NO: 4372 - DNA, 2208 bp, Artificial Sequence
  source: /note="Description of Artificial Sequence: Synthetic polynucleotide"
atggctgccgatggttatcttccagattggctcgaggacactctctctgaaggaataagacagtggtggaagctcaaacctggcccaccaccgccaaagcccgcagagcggcacaaggacgacagtaggggtcttgtgcttcctgggtacaagtacctcggacccttcaacggactcgacaaaggagagccggtcaacgaggcagacgccgcggccctcgagcacgacaaggcctacgaccggcagctcgacagcggagacaacccgtacctcaagtacaaccacgccgacgcggagtttcaggagcgtcttaaagaagatacgtcttttgggggcaacctcggacgagcagtattccaggcgaaaaagagggttcttgaacctctgggcctggttgaggagcctgttaagacggctccgggaaaaaagaggccggtagagcactctcctgtggagccagactcctcctcgggaaccggaaaagcgggccagcagcctgcaagaaaaagattgaattttggtcagactggagacgcagactccgtacctgacccccagcctctcggacagccaccagcagcccccacaagtttgggatctactacaatggctacaggcagtggcgcaccaatggcagacaataacgagggtgccgatggagtgggtaattcctcaggaaattggcattgcgattcccaatggctgggcgacagagtcatcaccaccagcacccgaacctgggccctgcccacctacaacaaccacctctacaagcaaatctccagccaatcaggagcatcgaacgacaaccactactttggccacagcaccccttgggggtattttgacttcaacagattccactgtcacttctccccacgtgactggcaaagactcatcaacaacaactggggattccgacccaagagactcaacttcaagctctttaacattcaagtcaaagaggtcacgcagaatgacggtacgacgacgattgccaataaccttaccagcacggttcaggtgtttactgactcggagtaccagctcccgtacgtcctcggctcggcgcatcaaggatgcctcccgccgttcccagcagacgtcttcatggtcccacagtatggatacctcaccctgaacaacgggagtcaggcggtaggacgctcttccttttactgcctggagtactttccttctcagatgcttcgtaccggaaacaactttaccttcagctacacctttgaagacgtgcctttccacagtagctacgctcacagccagagtctggatcggctgatgaatcctcttatcgaccagtacctgtattatctaaacaaaacacaatcaaatagtggaactcttcagcagtctcggctactgtttagtcaagctggacccaccagcatgtctcttcaagctaaaaactggctgcctggaccttgctacagacaacagcgtctgtcaaagcaggcaaacgacaacaacaacagcaactttccctggactgcggctacaaagtatcatctaaatggccgggactcgttggttaatccaggaccagctatggccagccacaaagacgatgaagaaaagtttttccccatgcatggaaccctgatatttggtaaacaaggaacaaatgctaacgacgcggatttggacaatgtcatgattacagatgaagaagaaatccgcaccaccaatcccgtggctacggagcagtacgggactgtgtcaaataatttgcaaaactcaaatactggtccaactactggaactgtcaatcaccaaggagcgttacctggtatggtgtggcaggatcgagacgtgtacctgcagggacccatttgggccaagattcctcacaccgatggacactttcatccttctccactgatgggaggttttggactcaaacacccgcctcctcagatcatgatcaaaaacactcccgttccagccaatcctcctacaaacttcagttctgccaagtttgcttccttcatcacacagtattccacgggacaagtcagcgtggagattgagtgggagctgcagaaggagaacagcaaacgctggaaccccgagatccagtacacttccaactacaacaaatctgttaatgtggactttactgtgggcactaatggcgtgtattcagagcctcgccccattggcaccagatacctgactcgtaatctgtaa

SEQ ID NO: 4373 - DNA, 2208 bp, Artificial Sequence
  source: /note="Description of Artificial Sequence: Synthetic polynucleotide"
atggctgccgatggttatcttccagattggctcgaggacactctctctgaaggaataagacagtggtggaagctcaaacctggcccaccaccgccaaagcccgcagagcggcacaaggacgacagtaggggtcttgtgcttcctgggtacaagtacctcggacccttcaacggactcgacaaaggagagccggtcaacgaggcagacgccgcggccctcgagcacgacaaggcctacgaccggcagctcgacagcggagacaacccgtacctcaagtacaaccacgccgacgcggagtttcaggagcgtcttaaagaagatacgtcttttgggggcaacctcggacgagcagtattccaggcgaaaaagagggttcttgaacctctgggcctggttgaggagcctgttaagacggctccgggaaaaaagaggccggtagagcactctcctgtggagccagactcctcctcgggaaccggaaaagcgggccagcagcctgcaagaaaaagattgaattttggtcagactggagacgcagactccgtacctgacccccagcctctcggacagccaccagcagcccccacaagtttgggatctactacaatggctacaggcagtggcgcaccaatggcagacaataacgagggtgccgatggagtgggtaattcctcaggaaattggcattgcgattcccaatggctgggcgacagagtcatcaccaccagcacccgaacctgggccctgcccacctacaacaaccacctctacaagcaaatctccagccaatcaggagcatcgaacgacaaccactactttggccacagcaccccttgggggtattttgacttcaacagattccactgtcacttctccccacgtgactggcaaagactcatcaacaacaactggggattccgacccaagagactcaacttcaagctctttaacattcaagtcaaagaggtcacgcagaatgacggtacgacgacgattgccaataaccttaccagcacggttcaggtgtttactgactcggagtaccagctcccgtacgtcctcggctcggcgcatcaaggatgcctcccgccgttcccagcagacgtcttcatggtcccacagtatggatacctcaccctgaacaacgggagtcaggcggtaggacgctcttccttttactgcctggagtactttccttctcagatgcttcgtaccggaaacaactttaccttcagctacacctttgaagacgtgcctttccacagtagctacgctcacagccagagtctggatcggctgatgaatcctcttatcgaccagtacctgtattatctaaacaaaacacaatcaaatagtggaactcttcagcagtctcggctactgtttagtcaagctggacccaccagcacgtctcttcaagctaaaaactggctgcctggaccttgctacagacaacagcgtctgtcaaagcaggcaaacgacaacaacaacagcaactttccctggactgcggctacaaagtatcatctaaatggccgggactcgttggttaatccaggaccagctatggccagccacaaagacgatgaagaaaagtttttccccatgcatggaaccctgatatttggtaaacaaggaacaaatgctaacgacgcggatttggacaatgtcatgattacagatgaagaagaaatccgcaccaccaatcccgtggctacggagcagtacgggactgtgtcaaataatttgcaaaactcaaatactggtccaactactggaactgtcaatcaccaaggagcgttacctggtatggtgtggcaggatcgagacgtgtacctgcagggacccatttgggccaagattcctcacaccgatggacactttcatccttctccactgatgggaggttttggactcaaacacccgcctcctcagatcatgatcaaaaacactcccgttccagccaatcctcctacaaacttcagttctgccaagtttgcttccttcatcacacagtattccacgggacaagtcagcgtggagattgagtgggagctgcagaaggagaacagcaaacgctggaaccccgagatccagtacacttccaactacaacaaatctgttaatgtggactttactgtggacactaatggcgtgtattcagagcctcgccccattggcaccagatacctgactcgtaatctgtaa

SEQ ID NO: 4374 - DNA, 2208 bp, Artificial Sequence
  source: /note="Description of Artificial Sequence: Synthetic polynucleotide"
atggctgccgatggttatcttccagattggctcgaggacactctctctgaaggaataagacagtggtggaagctcaaacctggcccaccaccgccaaagcccgcagagcggcacaaggacgacagtaggggtcttgtgcttcctgggtacaagtacctcggacccttcaacggactcgacaaaggagagccggtcaacgaggcagacgccgcggccctcgagcacgacaaggcctacgaccggcagctcgacagcggagacaacccgtacctcaagtacaaccacgccgacgcggagtttcaggagcgtcttaaagaagatacgtcttttgggggcaacctcggacgagcagtattccaggcgaaaaagagggttcttgaacctctgggcctggttgaggagcctgttaagacggctccgggaaaaaagaggccggtagagcactctcctgtggagccagactcctcctcgggaaccggaaaagcgggccagcagcctgcaagaaaaagattgaattttggtcagactggagacgcagactccgtacctgacccccagcctctcggacagccaccagcagcccccacaagtttgggatctactacaatggctacaggcagtggcgcaccaatggcagacaataacgagggtgccgatggagtgggtaattcctcaggaaattggcattgcgattcccaatggctgggcgacagagtcatcaccaccagcacccgaacctgggccctgcccacctacaacaaccacctctacaagcaaatctccagccaatcaggagcatcgaacgacaaccactactttggccacagcaccccttgggggtattttgacttcaacagattccactgtcacttctccccacgtgactggcaaagactcatcaacaacaactggggattccgacccaagagactcaacttcaagctctttaacattcaagtcaaagaggtcacgcagaatgacggtacgacgacgattgccaataaccttaccagcacggttcaggtgtttactgactcggagtaccagctcccgtacgtcctcggctcggcgcatcaaggatgcctcccgccgttcccagcagacgtcttcatggtcccacagtatggatacctcaccctgaacaacgggagtcaggcggtaggacgctcttccttttactgcctggagtactttccttctcagatgcttcgtaccggaaacaactttaccttcagctacacctttgaagacgtgcctttccacagtagctacgctcacagccagagtctggatcggctgatgaatcctcttatcgaccagtacctgtattatctaaacaaaacacaatcaaatagtggaactcttcagcagtctcggctactgtttagtcaagctggacccaccagcatgtctcttcaagctaaaaactggctgcctggaccttgctacagacaacagcgtctgtcaaagcaggcaaacgacaacaacaacagcaactttccctggactgcggctacaaagtatcatctaaatggccgggactcgttggttaatccaggaccagctatggccagccacaaagacgatgaagaaaagtttttccccatgcatggaaccctgatatttggtaaacaaggaacaaatgctaacgacgcggatttggacaatgtcatgattacagatgaagaagaaatccgcaccaccaatcccgtggctacggagcagtacgggactgtgtcaaataatttgcaaaactcaaatactggtccaactactggaactatcaatcaccaaggagcgttacctggtatggtgtggcaggatcgagacgtgtacctgcagggacccatttgggccaagattcctcacaccgatggacactttcatccttctccactgatgggaggttttggactcaaacacccgcctcctcagatcatgatcaaaaacactcccgttccagccaatcctcctacaaacttcagttctgccaagtttgcttccttcatcacacagtattccacgggacaagtcagcgtggagattgagtgggagctgcagaaggagaacagcaaacgctggaaccccgagatccagtacacttccaactacaacaaatctgttaatgtggactttactgtggacactaatggcgtgtattcagagcctcgccccattggcaccagatacctgactcgtaatctgtaa

SEQ ID NO: 4375 - DNA, 2208 bp, Artificial Sequence
  source: /note="Description of Artificial Sequence: Synthetic polynucleotide"
atggctgccgatggttatcttccagattggctcgaggacactctctctgaaggaataagacagtggtggaagctcaaacctggcccaccaccgccaaagcccgcagagcggcacaaggacgacagtaggggtcttgtgcttcctgggtacaagtacctcggacccttcaacggactcgacaaaggagagccggtcaacgaggcagacgccgcggccctcgagcacgacaaggcctacgaccggcagctcgacagcggagacaacccgtacctcaagtacaaccacgccgacgcggagtttcaggagcgtcttaaagaagatacgtcttttgggggcaacctcggacgagcagtattccaggcgaaaaagagggttcttgaacctctgggcctggttgaggagcctgttaagacggctccgggaaaaaagaggccggtagagcactctcctgtggagccagactcctcctcgggaaccggaaaagcgggccagcagcctgcaagaaaaagattgaattttggtcagactggagacgcagactccgtacctgacccccagcctctcggacagccaccagcagcccccacaagtttgggatctactacaatggctacaggcagtggcgcaccaatggcagacaataacgagggtgccgatggagtgggtaattcctcaggaaattggcattgcgattcccaatggctgggcgacagagtcatcaccaccagcacccgaacctgggccctgcccacctacaacaaccacctctacaagcaaatctccagccaatcaggagcatcgaacgacaaccactactttggccacagcaccccttgggggtattttgacttcaacagattccactgtcacttctccccacgtgactggcaaagactcatcaacaacaactggggattccgacccaagagactcaacttcaagctctttaacattcaagtcaaagaggtcacgcagaatgacggtacggcgacgattgccaataaccttaccagcacggttcaggtgtttactgactcggagtaccagctcccgtacgtcctcggctcggcgcatcaaggatgcctcccgccgttcccagcagacgtcttcatggtcccacagtatggatacctcaccctgaacaacgggagtcaggcggtaggacgctcttccttttactgcctggagtactttccttctcagatgcttcgtaccggaaacaactttaccttcagctacacctttgaagacgtgcctttccacagtagctacgctcacagccagagtctggatcggctgatgaatcctcttatcgaccagtacctgtattatctaaacaaaacacaatcaaatagtggaactcttcagcagtctcggctactgtttagtcaagctggacccaccagcatgtctcttcaagctaaaaactggctgcctggaccttgctacagacaacagcgtctgtcaaagcaggcaaacgacaacaacaacagcaactttccctggactgcggctacaaagtatcatctaaatggccgggactcgttggttaatccaggaccagctatggccagccacaaagacgatgaagaaaagtttttccccatgcatggaaccctgatatttggtaaacaaggaacaaatgctaacgacgcggatttggacaatgtcatgattacagatgaagaagaaatccgcaccaccaatcccgtggctacggagcagtacgggactgtgtcaaataatttgcaaaactcaaatactggtccaactactggaactgtcaatcaccaaggagcgttacctggtatggtgtggcaggatcgagacgtgtacctgcagggacccatttgggccaagattcctcacaccgatggacactttcatccttctccactgatgggaggttttggactcaaacacccgcctcctcagatcatgatcaaaaacactcccgttccagccaatcctcctacaaacttcagttctgccaagtttgcttccttcatcacacagtattccacgggacaagtcagcgtggagattgagtgggagctgcagaaggagaacagcaaacgctggaaccccgagatccagtacacttccaactacaacaaatctgttaatgtggactttactgtggacactaatggcgtgtattcagagcctcgccccattggcaccagatacctgactcgtaatctgtaa

SEQ ID NO: 4376 - DNA, 2208 bp, Artificial Sequence
  source: /note="Description of Artificial Sequence: Synthetic polynucleotide"
atggctgccgatggttatcttccagattggctcgaggacactctctctgaaggaataagacagtggtggaagctcaaacctggcccaccaccgccaaagcccgcagagcggcacaaggacgacagtaggggtcttgtgcttcctgggtacaagtacctcggacccttcaacggactcgacaaaggagagccggtcaacgaggcagacgccgcggccctcgagcacgacaaggcctacgaccggcagctcgacagcggagacaacccgtacctcaagtacaaccacgccgacgcggagtttcaggagcgtcttaaagaagatacgtcttttgggggcaacctcggacgagcagtattccaggcgaaaaagagggttcttgaacctctgggcctggttgaggagcctgttaagacggctccgggaaaaaagaggccggtagagcactctcctgtggagccagactcctcctcgggaaccggaaaagcgggccagcagcctgcaagaaaaagattgaattttggtcagactggagacgcagactccgtacctgacccccagcctctcggacagccaccagcagcccccacaagtttgggatctactacaatggctacaggcagtggcgcaccaatggcagacaataacgagggtgccgatggagtgggtaattcctcaggaaattggcattgcgattcccaatggctgggcgacagagtcatcaccaccagcacccgaacctgggccctgcccacctacaacaaccacctctacaagcaaatctccagccaatcaggagcatcgaacgacaaccactactttggccacagcaccccttgggggtattttgacttcaacagattccactgtcacttctccccacgtgactggcaaagactcatcaacaacaactggggattccgacccaagagactcaacttcaagctctttaacattcaagtcaaagaggtcacgcagaatgacggtacgacgacgattgccaataaccttaccagcacggttcaggtgtttactgactcggagtaccagctcccgtacgtcctcggctcggcgcatcaaggatgcctcccgccgttcccagcagacgtcttcatggtcccacagtatggatacctcaccctgaacaacgggagtcaggcggtaggacgctcttccttttactgcctggagtactttccttctcagatgcttcgtaccggaaacaactttaccttcagctacacctttgaagacgtgcctttccacagtagctacgctcacagccagagtctggatcggctgatgaatcctcttatcgaccagtacctgtattatctaaacaaaacacaatcaaatagtggaactcttcagcagtctcggctactgtttagtcaagctggacccaccagcatgtctcttcaagctaaaaactggctgcctggaccttgctacagacaacagcgtctgtcaaagcaggcaaacgacaacaacaacagcaactttccctggactgtggctacaaagtatcatctaaatggccgggactcgttggttaatccaggaccagctatggccagccacaaagacgatgaagaaaagtttttccccatgcatggaaccctgatatttggtaaacaaggaacaaatgctaacgacgcggatttggacaatgtcatgattacagatgaagaagaaatccgcaccaccaatcccgtggctacggagcagtacgggactgtgtcaaataatttgcaaaactcaaatactggtccaactactggaactgtcaatcaccaaggagcgttacctggtatggtgtggcaggatcgagacgtgtacctgcagggacccatttgggccaagattcctcacaccgatggacactttcatccttctccactgatgggaggttttggactcaaacacccgcctcctcagatcatgatcaaaaacactcccgttccagccaatcctcctacaaacttcagttctgccaagtttgcttccttcatcacacagtattccacgggacaagtcagcgtggagattgagtgggagctgcagaaggagaacagcaaacgctggaaccccgagatccagtacacttccaactacaacaaatctgttaatgtggactttactgtggacactaatggcgtgtattcagagcctcgccccattggcaccagatacctgactcgtaatctgtaa

SEQ ID NO: 4377 - DNA, 2208 bp, Artificial Sequence
  source: /note="Description of Artificial Sequence: Synthetic polynucleotide"
atggctgccgatggttatcttccagattggctcgaggacactctctctgaaggaataagacagtggtggaagctcaaacctggcccaccaccgccaaagcccgcagagcggcacaaggacgacagtaggggtcttgtgcttcctgggtacaagtacctcggacccttcaacggactcgacaaaggagagccggtcaacgaggcagacgccgcggccctcgagcacgacaaggcctacgaccggcagctcgacagcggagacaacccgtacctcaagtacaaccacgccgacgcggagtttcaggagcgtcttaaagaagatacgtcttttgggggcaacctcggacgagcagtattccaggcgaaaaagagggttcttgaacctctgggcctggttgaggagcctgttaagacggctccgggaaaaaagaggccggtagagcactctcctgtggagccagactcctcctcgggaaccggaaaagcgggccagcagcctgcaagaaaaagattgaattttggtcagactggagacgcagactccgtacctgacccccagcctctcggacagccaccagcagcccccacaagtttgggatctactacaatggctacaggcagtggcgcaccaatggcagacaataacgagggtgccgatggagtgggtaattcctcaggaaattggcattgcgattcccaatggctgggcgacagagtcatcaccaccagcacccgaacctgggccctgcccacctacaacaaccacctctacaagcaaatctccagccaatcaggagcatcgaacgacaaccactactttggccacagcaccccttgggggtattttgacttcaacagattccactgtcacttctccccacgtgactggcaaagactcatcaacaacaactggggattccgacccaagagactcaacttcaagctctttaacattcaagtcaaagaggtcacgcagaatgacggtacgacgacgattgccaataaccttaccagcacggttcaggtgtttactgactcggagtaccagctcccgtacgtcctcggctcggcgcatcaaggatgcctcccgccgttcccagcagacgtcttcatggtcccacagtatggatacctcaccctgaacaacgggagtcaggcggtaggacgctcttccttttactgcctggagtactttccttctcagatgcttcgtaccggaaacaactttaccttcagctacacctttgaagacgtgcctttccacagtagctacgctcacagccagagtctggatcggctgatgaatcctcttatcgaccagtacctgtattatctaaacaaaacacaatcaaatagtggaactcttcagcagtctcggctactgtttagtcaagctggacccaccagcatgtctcttcaagctaaaaactggctgcctggaccttgctacagacaacagcgtctgtcaaagcaggcaaacgacaacaacaacagcaactttccctggactgcggctacaaagtatcatctaaatggccgggactcgttggttaatccaggaccagctatggccagccacaaagacgatgaagaaaagtttttccccatgcatggaaccctgatatttggtaaacaaggaacaaatgctaacgacgcggatttggacaatgtcatgattacagatgaagaagaaatccgcaccaccaatcccgtggctacggagcagtacgggactgtgtcaaataatttgcaaaactcaaatactggtccaactactggaactgtcaatcaccaaggagcgttacctggtatggtgtggcaggatcgagacgtgtacctgcagggacccatttgggccaagattcctcacaccgatggacactttcatccttctccactgatgggaggttttggactcaaacacccgcctcctcagatcatgatcaaaaacactcccgttccagccaatcctcctacaaacttcagttctgccaagtttgcttccttcatcacacagcattccacgggacaagtcagcgtggagattgagtgggagctgcagaaggagaacagcaaacgctggaaccccgagatccagtacacttccaactacaacaaatctgttaatgtggactttactgtggacactaatggcgtgtattcagagcctcgccccattggcaccagatacctgactcgtaatctgtaa

SEQ ID NO: 4378 - DNA, 2208 bp, Artificial Sequence
  source: /note="Description of Artificial Sequence: Synthetic polynucleotide"
atggctgccgatggttatcttccagattggctcgaggacactctctctgaaggaataagacagtggtggaagctcaaacctggcccaccaccgccaaagcccgcagagcggcacaaggacgacggtaggggtcttgtgcttcctgggtacaagtacctcggacccttcaacggactcgacaaaggagagccggtcaacgaggcagacgccgcggccctcgagcacgacaaggcctacgaccggcagctcgacagcggagacaacccgtacctcaagtacaaccacgccgacgcggagtttcaggagcgtcttaaagaagatacgtcttttgggggcaacctcggacgagcagtattccaggcgaaaaagagggttcttgaacctctgggcctggttgaggagcctgttaagacggctccgggaaaaaagaggccggtagagcactctcctgtggagccagactcctcctcgggaaccggaaaagcgggccagcagcctgcaagaaaaagattgaattttggtcagactggagacgcagactccgtacctgacccccagcctctcggacagccaccagcagcccccacaagtttgggatctactacaatggctacaggcagtggcgcaccaatggcagacaataacgagggtgccgatggagtgggtaattcctcaggaaattggcattgcgattcccaatggctgggcgacagagtcatcaccaccagcacccgaacctgggccctgcccacctacaacaaccacctctacaagcaaatctccagccaatcaggagcatcgaacgacaaccactactttggctacagcaccccttgggggtattttgacttcaacagattccactgtcacttctccccacgtgactggcaaagactcatcaacaacaactggggattccgacccaagagactcaacttcaagctctttaacattcaagtcaaagaggtcacgcagaatgacggtacgacgacgattgccaataaccttaccagcacggttcaggtgtttactgactcggagtaccagctcccgtacgtcctcggctcggcgcatcaaggatgcctcccgccgttcccagcagacgtcttcatggtcccacagtatggatacctcaccctgaacaacgggagtcaggcggtaggacgctcttccttttactgcctggagtactttccttctcagatgcttcgtaccggaaacaactttaccttcagctacacctttgaagacgtgcctttccacagtagctacgctcacagccagagtctggatcggctgatgaatcctcttatcgaccagtacctgtattatctaaacaaaacacaatcaaatagtggaactcttcagcagtctcggctactgtttagtcaagctggacccaccagcatgtctcttcaagctaaaaactggctgcctggaccttgctacagacaacagcgtctgtcaaagcaggcaaacgacaacaacaacagcaactttccctggactgcggctacaaagtatcatctaaatggccgggactcgttggttaatccaggaccagctatggccagccacaaagacgatgaagaaaagtttttccccatgcatggaaccctgatatttggtaaacaaggaacaaatgctaacgacgcggatttggacaatgtcatgattacagatgaagaagaaatccgcaccaccaatcccgtggctacggagcagtacgggactgtgtcaaataatttgcaaaactcaaatactggtccaactactggaactgtcaatcaccaaggagcgttacctggtatggtgtggcaggatcgagacgtgtacctgcagggacccatttgggccaagattcctcacaccgatggacactttcatccttctccactgatgggaggttttggactcaaacacccgcctcctcagatcatgatcaaaaacactcccgttccagccaatcctcctacaaacttcagttctgccaagtttgcttccttcatcacacagtattccacaggacaagtcagcgtggagattgagtgggagctgcagaaggagaacagcaaacgctggaaccccgagatccagtacacttccaactacaacaaatctgttaatgtggactttactgtggacactaatggcgtgtattcagagcctcgccccattggcaccagatacctgactcgtaatctgtaa

SEQ ID NO: 4379 - DNA, 2208 bp, Artificial Sequence
  source: /note="Description of Artificial Sequence: Synthetic polynucleotide"
atggctgccgatggttatcttccagattggctcgaggacactctctctgaaggaataagacagtggtggaagctcaaacctggcccaccaccgccaaagcccgcagagcggcacaaggacgacagtaggggtcttgtgcttcctgggtacaagtacctcggacccttcaacggactcgacaaaggagagccggtcaacgaggcagacgccgcggccctcgagcacgacaaggcctacgaccggcagctcgacagcggagacaacccgtacctcaagtacaaccacgccgacgcggagcttcaggagcgtcttaaagaagatacgtcttttgggggcaacctcggacgagcagtattccaggcgaaaaagagggttcttgaacctctgggcctggttgaggagcctgttaagacggctccgggaaaaaagaggccggtagagcactctcctgtggagccagactcctcctcgggaaccggaaaagcgggccagcagcctgcaagaaaaagattgaattttggtcagactggagacgcagactccgtacctgacccccagcctctcggacagccaccagcagcccccacaagtttgggatctactacaatggctacaggcagtggcgcaccaatggcagacaataacgagggtgccgatggagtgggtaattcctcaggaaattggcattgcgattcccaatggctgggcgacagagtcatcaccaccagcacccgaacctgggccctgcccacctacaacaaccacctctacaagcaaatctccagccaatcaggagcatcgaacgacaaccactactttggctacagcaccccttgggggtattttgacttcaacagattccactgtcacttctccccacgtgactggcaaagactcatcaacaacaactggggattccgacccaagagactcaacttcaagctctttaacattcaagtcaaagaggtcacgcagaatgacggtacgacgacgattgccaataaccttaccagcacggttcaggtgtttactgactcggagtaccagctcccgtacgtcctcggctcggcgcatcaaggatgcctcccgccgttcccagcagacgtcttcatggtcccacagtatggatacctcaccctgaacaacgggagtcaggcggtaggacgctcttccttttactgcctggagtactttccttctcagatgcttcgtaccggaaacaactttaccttcagctacacctttgaagacgtgcctttccacagtagctacgctcacagccagagtctggatcggctgatgaatcctcttatcgaccagtacctgtattatctaaacaaaacacaatcaaatagtggaactcttcagcagtctcggctactgtttagtcaagctggacccaccagcatgtctcttcaagctaaaaactggctgcctggaccttgctacagacaacagcgtctgtcaaagcaggcaaacgacaacaacaacagcaactttccctggactgcggctacaaagtatcatctaaatggccgggactcgttggttaatccaggaccagctatggccagccacaaagacgatgaagaaaagtttttccccatgcatggaaccctgatatttggtaaacaaggaacaaatgctaacgacgcggatttggacaatgtcatgattacagatgaagaagaaatccgcaccaccaatcccgtggctacggagcagtacgggactgtgtcaaataatttgcaaaactcaaatactggtccaactactggaactgtcaatcaccaaggagcgttacctggtatggtgtggcaggatcgagacgtgtacctgcagggacccatttgggccaagattcctcacaccgatggacactttcatccttctccactgatgggaggttttggactcaaacacccgcctcctcagatcatgatcaaaaacactcccgttccagccaatcctcctacaaacttcagttctgccaagtttgcttccttcatcacacagtattccacaggacaagtcagcgtggagattgagtgggagctgcagaaggagaacagcaaacgctggaaccccgagatccagtacacttccaactacaacaaatctgttaatgtggactttactgtggacactaatggcgtgtattcagagcctcgccccattggcaccagatacctgactcgtaatctgtaa

SEQ ID NO: 4380 - DNA, 2208 bp, Artificial Sequence
  source: /note="Description of Artificial Sequence: Synthetic polynucleotide"
atggctgccgatggttatcttccagattggctcgaggacactctctctgaaggaataagacagtggtggaagctcaaacctggcccaccaccgccaaagcccgcagagcggcacaaggacgacagtaggggtcttgtgcttcctgggtacaagtacctcggacccttcaacggactcgacaaaggagagccggtcaacgaggcagacgccgcggccctcgagcacgacaaggcctacgaccggcagctcgacagcggagacaacccgtacctcaagtacaaccacgccgacgcggagtttcaggagcgtcttaaagaagatacgtcttttgggggcaacctcggacgagcagtattccaggcgaaaaagagggttcttgaacctctgggcctggttgaggagcctgttaagacggctccgggaaaaaagaggccggtagagcactctcctgtggagccagactcctcctcgggaaccggaaaagcgggccagcagcctgcaagaaaaagattgaattttggtcagactggagacgcagactccgtacctgacccccagcctctcggacagccaccagcagcccccacaagtttgggatctactacaatggctacaggcagtggcgcaccaatggcagacaataacgagggtgccgatggagtgggtaattcctcaggaaattggcattgcgattcccaatggctgggcgacagagtcatcaccaccagcacccgaacctgggccctgcccacctacaacaaccacctctacaagcaaatctccagccaatcaggagcatcgaacgacaaccactactttggctacagcaccccttgggggtattttgacttcaacagattccactgtcacttctccccacgtgactggcaaagactcatcaacaacaactggggattccgacccaagagactcaacttcaagctctttaacattcaagtcaaagaggtcacgcagaatgacggtacgacgacgattgccaataaccttaccagcacggttcaggtgtttactgactcggagtaccagctcccgtacgtcctcggctcggcgcatcaaggatgcctcccgccgttcccagcagacgtcttcatggtcccacagtatggatacctcaccctgaacaacgggagtcaggcggtaggacgctcttccttttactgcctggagtactttccttctcagatgcttcgtaccggaaacaactttaccttcagctacacctttgaagacgtgcctttccacagtagctacgctcacagccagagtctggatcggctgatgaatcctcttatcgaccagtacctgtattatctaaacaaaacacaatcaaatagtggaactcttcagcagtctcggctactgtttagtcaagctggacccaccagcatgtctcttcaagctaaaaactggctgcctggaccttgctacagacaacagcgtctgtcaaagcaggcaaacgacaacaacaacagcaactttccctggactgcggctacaaagtatcatctaaatggccgggactcgttggttaatccaggaccagctatggccagccacaaagacgatgaagaaaagtttttccccatgcatggaaccctgatatttggtaaacaaggaacaaatgctaacgacgcggatttggacaatgtcatgattacagatgaagaagaaatccgcaccaccaatcccgtggctacggagcagtacgggactgtgtcaaataatttgcaaaactcaaatactggtccaactactggaactgtcaatcaccaaggagcgttacctggtatggtgtggcaggatcgagacgtgtacctgcagggacccatttgggccaagattcctcacaccgatggacactttcatccttctccactggtgggaggttttggactcaaacacccgcctcctcagatcatgatcaaaaacactcccgttccagccaatcctcctacaaacttcagttctgccaagtttgcttccttcatcacacagtattccacaggacaagtcagcgtggagattgagtgggagctgcagaaggagaacagcaaacgctggaaccccgagatccagtacacttccaactacaacaaatctgttaatgtggactttactgtggacactaatggcgtgtattcagagcctcgccccattggcaccagatacctgactcgtaatctgtaa

SEQ ID NO: 4381 - DNA, 2208 bp, Artificial Sequence
  source: /note="Description of Artificial Sequence: Synthetic polynucleotide"
atggctgccgatggttatcttccagattggctcgaggacactctctctgaaggaataagacagtggtggaagctcaaacctggcccaccaccgccaaagcccgcagagcggcacaaggacgacagtaggggtcttgtgcttcctgggtacaagtacctcggacccttcaacggactcgacaaaggagagccggtcaacgaggcagacgccgcggccctcgagcacgacaaggcctacgaccggcagctcgacagcggagacaacccgtacctcaagtacaaccacgccgacgcggagtttcaggagcgtcttaaagaagatacgtcttttgggggcaacctcggacgagcagtattccaggcgaaaaagagggttcttgaacctctgggcctggttgaggagcctgttaagacggctccgggaaaaaagaggccggtagagcactctcctgtggagccagactcctcctcgggaaccggaaaagcgggccagcagcctgcaagaaaaagattgaattttggtcagactggagacgcagactccgtacctgacccccagcctctcggacagccaccagcagcccccacaagtttgggatctactacaatggctacaggcagtggcgcaccaatggcagacaataacgagggtgccgatggagtgggtaattcctcaggaaattggcattgcgattcccaatggctgggcgacagagtcatcaccaccagcacccgaacctgggccctgcccacctacaacaaccacctctacaagcaaatctccagccaatcaggagcatcgaacgacaaccactactttggctacagcaccccttgggggtattttgacttcaacagattccactgtcacttctccccacgtgactggcaaagactcatcaacaacaactggggattccgacccaagagactcaacttcaagctctttaacattcaagtcaaagaggtcacgcagaatgacggtacgacgacgattgccaataaccttaccagcacggttcaggtgtttactgactcggagtaccagctcccgtacgtcctcggctcggcgcatcaaggatgcctcccgccgttcccagcagacgtcttcatggtcccacagtatggatacctcaccctgaacaacgggagtcaggcggtaggacgctcttccttttactgcctggagtactttccttctcagatgcttcgtaccggaaacaactttaccttcagctacacctttgaagacgtgcctttccacagtagctacgctcacagccagagtctggatcggctgatgaatcctcttatcgaccagtacctgtattatctaaacaaaacacaatcaaatagtggaactcttcagcagtctcggctactgtttagtcaagctggacccaccagcatgtctcttcaagctaaaaactggctgcctggaccttgctacagacaacagcgtctgtcaaagcaggcaaacgacaacaacaacagcaactttccctggactgcggctacaaagtatcatctaaatggccgggactcgttggttaatccaggaccagctatggccagccacaaagacgatgaagaaaagtttttccccatgcatggaaccctgatatttggtaaacaaggaacaaatgctaacgacgcggatttggacaatgtcatgattacagatgaagaagaaatccgcaccaccaatcccgtggctacggagcagtacgggactgtgtcaaataatttgcaaaactcaaatactggtccaactactggaactgtcaatcaccaaggagcgttacctggtatggtgtggcaggatcgagacgtgtacctgcagggacccatttgggccaagattcctcacaccgatggacactttcatccttctccactgatgggaggttttggactcaaacacccgcctcctcagatcatgatcaaaaacactcccgttccagccaatcctcctacaaacttcagttctgccaagtttgcttccttcatcacacagtattccacaggacaagtcggcgtggagattgagtgggagctgcagaaggagaacagcaaacgctggaaccccgagatccagtacacttccaactacaacaaatctgttaatgtggactttactgtggacactaatggcgtgtattcagagcctcgccccattggcaccagatacctgactcgtaatctgtaa

SEQ ID NO: 4382 - DNA, 2208 bp, Artificial Sequence
  source: /note="Description of Artificial Sequence: Synthetic polynucleotide"
atggctgccgatggttatcttccagattggctcgaggacactctctctgaaggaataagacagtggtggaagctcaaacctggcccaccaccgccaaagcccgcagagcggcacaaggacgacagtaggggtcttgtgcttcctgggtacaagtacctcggacccttcaacggactcgacaaaggagagccggtcaacgaggcagacgccgcggccctcgagcacgacaaggcctacgaccggcagctcgacagcggagacaacccgtacctcaagtacaaccacgccgacgcggagtttcaggagcgtcttaaagaagatacgtcttttgggggcaacctcggacgagcagtattccaggcgaaaaagagggttcttgaacctctgggcctggttgaggagcctgttaagacggctccgggaaaaaagaggccggtagagcactctcctgtggagccagactcctcctcgggaaccggaaaagcgggccagcagcctgcaagaaaaagattgaattttggtcagactggagacgcagactccgtacctgacccccagcctctcggacagccaccagcagcccccacaagtttgggatctactacaatggctacaggcagtggcgcaccaatggcagacaataacgagggtgccgatggagtgggtaattcctcaggaaattggcattgcgattcccaatggctgggcgacagagtcatcaccaccagcacccgaacctgggccctgcccacctacaacaaccacctctacaagcaaatctccagccaatcaggagcatcgaacgacaaccactactttggctacagcaccccttgggggtattttgacttcaacagattccactgtcacttctccccacgtgactggcaaagactcatcaacaacaactggggattccgacccaagagactcaacttcaagctctttaacattcaagtcaaagaggtcacgcagaatgacggtacgacgacgattgccaataaccttaccagcacggttcaggtgtttactgactcggagtaccagcccccgtacgtcctcggctcggcgcatcaaggatgcctcccgccgttcccagcagacgtcttcatggtcccacagtatggatacctcaccctgaacaacgggagtcaggcggtaggacgctcttccttttactgcctggagtactttccttctcagatgcttcgtaccggaaacaactttaccttcagctacacctttgaagacgtgcctttccacagtagctacgctcacagccagagtctggatcggctgatgaatcctcttatcgaccagtacctgtattatctaaacaaaacacaatcaaatagtggaactcttcagcagtctcggctactgtttagtcaagctggacccaccagcatgtctcttcaagctaaaaactggctgcctggaccttgctacagacaacagcgtctgtcaaagcaggcaaacgacaacaacaacagcaactttccctggactgcggctacaaagtatcatctaaatggccgggactcgttggttaatccaggaccagctatggccagccacaaagacgatgaagaaaagtttttccccatgcatggaaccctgatatttggtaaacaaggaacaaatgctaacgacgcggatttggacaatgtcatgattacagatgaagaagaaatccgcaccaccaatcccgtggctacggagcagtacgggactgtgtcaaataatttgcaaaactcaaatactggtccaactactggaactgtcaatcaccaaggagcgttacctggtatggtgtggcaggatcgagacgtgtacctgcagggacccatttgggccaagattcctcacaccgatggacactttcatccttctccactgatgggaggttttggactcaaacacccgcctcctcagatcatgatcaaaaacactcccgttccagccaatcctcctacaaacttcagttctgccaagtttgcttccttcatcacacagtattccacgggacaagtcagcgtggagattgagtgggagctgcagaaggagaacagcaaacgctggaaccccgagatccagtacacttccaactacaacaaatctgttaatgtggactttactgtggacactaatggcgtgtattcagagcctcgccccattggcaccagatacctgactcgtaatctgtaa

SEQ ID NO: 4383 - DNA, 2208 bp, Artificial Sequence
  source: /note="Description of Artificial Sequence: Synthetic polynucleotide"
atggctgccgatggttatcttccagattggctcgaggacactctctctgaaggaataagacagtggtggaagctcaaacctggcccaccaccgccaaagcccgcagagcggcacaaggacgacagtaggggtcttgtgcttcctgggtacaagtacctcggacccttcaacggactcgacaaaggagagccggtcaacgaggcagacgccgcggccctcgagcacgacaaggcctacgaccggcagctcgacagcggagacaacccgtacctcaagtacaaccacgccgacgcggagtttcaggagcgtcttaaagaagatacgtcttttgggggcaacctcggacgagcagtattccaggcgaaaaagagggttcttgaacctctgggcctggttgaggagcctgttaagacggctccgggaaaaaagaggccggtagagcactctcctgtggagccagactcctcctcgggaaccggaaaagcgggccagcagcctgcaagaaaaagattgaattttggtcagactggagacgcagactccgtacctgacccccagcctctcggacagccaccagcagcccccacaagtttgggatctactacaatggctacaggcagtggcgcaccaatggcagacaatgacgagggtgccgatggagtgggtaattcctcaggaaattggcattgcgattcccaatggctgggcgacagagtcatcaccaccagcacccgaacctgggccctgcccacctacaacaaccacctctacaagcaaatctccagccaatcaggagcatcgaacgacaaccactactttggctacagcaccccttgggggtattttgacttcaacagattccactgtcacttctccccacgtgactggcaaagactcatcaacaacaactggggattccgacccaagagactcaacttcaagctctttaacattcaagtcaaagaggtcacgcagaatgacggtacgacgacgattgccaataaccttaccagcacggttcaggtgtttactgactcggagtaccagctcccgtacgtcctcggctcggcgcatcaaggatgcctcccgccgttcccagcagacgtcttcatggtcccacagtatggatacctcaccctgaacaacgggagtcaggcggtaggacgctcttccttttactgcctggagtactttccttctcagatgcttcgtaccggaaacaactttaccttcagctacacctttgaagacgtgcctttccacagtagctacgctcacagccagagtctggatcggctgatgaatcctcttatcgaccagtacctgtattatctaaacaaaacacaatcaaatagtggaactcttcagcagtctcggctactgtttagtcaagctggacccaccagcatgtctcttcaagctaaaaactggctgcctggaccttgctacagacaacagcgtctgtcaaagcaggcaaacgacaacaacaacagcaactttccctggactgcggctacaaagtatcatctaaatggccgggactcgttggttaatccaggaccagctatggccagccacaaagacgatgaagaaaagtttttccccatgcatggaaccctgatatttggtaaacaaggaacaaatgctaacgacgcggatttggacaatgtcatgattacagatgaagaagaaatccgcaccaccaatcccgtggctacggagcagtacgggactgtgtcaaataatttgcaaaactcaaatactggtccaactactggaactgtcaatcaccaaggagcgttacctggtatggtgtggcaggatcgagacgtgtacctgcagggacccatttgggccaagattcctcacaccgatggacactttcatccttctccactgatgggaggttttggactcaaacacccgcctcctcagatcatgatcaaaaacactcccgttccagccaatcctcctacaaacttcagttctgccaagtttgcttccttcatcacacagtattccacaggacaagtcagcgtggagattgagtgggagctgcagaaggagaacagcaaacgctggaaccccgagatccagtacacttccaactacaacaaatctgttaatgtggactttactgtggacactaatggcgtgtattcagagcctcgccccattggcaccagatacctgactcgtaatctgtaa

SEQ ID NO: 4384 - DNA, 2208 bp, Artificial Sequence
  source: /note="Description of Artificial Sequence: Synthetic polynucleotide"
atggctgccgatggttatcttccagattggctcgaggacactctctctgaaggaataagacagtggtggaagctcaaacctggcccaccaccgccaaagcccgcagagcggcacaaggacgacagtaggggtcttgtgcttcctgggtacaagtacctcggacccttcaacggactcgacaaaggagagccggtcaacgaggcagacgccgcggccctcgagcacgacaaggcctacgaccggcagctcgacagcggagacaacccgtacctcaagtacaaccacgccgacgcggagtttcaggagcgtcttaaagaagatacgtcttttgggggcaacctcggacgagcagtattccaggcgaaaaagagggttcttgaacctctgggcctggttgaggagcctgttaagacggctccgggaaaaaagaggccggtagagcactctcctgtggagccagactcctcctcgggaaccggaaaagcgggccagcagcctgcaagaaaaagattgaattttggtcagactggagacgcagactccgtacctgacccccagcctctcggacagccaccagcagcccccacaagtttgggatctactacaatggctacaggcagtggcgcaccaatggcagacaataacgagggtgccgatggagtgggtaattcctcaggaaattggcattgcgattcccaatggctgggcgacagagtcatcaccaccagcacccgaacctgggccctgcccacctacaacaaccacctctacaagcaaatctccagccaatcaggagcatcgaacgacaaccactactttggctacagcaccccttgggggtattttgacttcaacagattccactgtcacttctccccacgtgactggcaaagactcatcaacaacaactggggattccgacccaagagactcaacttcaagctctttaacattcaagtcaaagaggtcacgcagaatgacggtacgacgacgattgccaataaccttaccagcacggttcaggtgtttactgactcggagtaccagctcccgtacgtcctcggctcggcgcatcaaggatgcctcccgccgttcccagcagacgtcttcatggtcccacagtatggatacctcaccctgaacaacgggagtcaggcggtaggacgctcttccttttactgcctggagtactttccttctcagatgcttcgtaccggaaacaactttaccttcagctacacctttgaagacgtgcctttccacagtagctacgctcacagccagagtctggatcggctgatgaatcctcttatcgaccagtacctgtattatctaaacaaaacacaatcaaatagtggaactcttcagcagtctcggctactgtttagtcaagctggacccaccagcatgtctcttcaagctaaaaactggctgcctggaccttgctacagacaacagcgtctgccaaagcaggcaaacgacaacaacaacagcaactttccctggactgcggctacaaagtatcatctaaatggccgggactcgttggttaatccaggaccagctatggccagccacaaagacgatgaagaaaagtttttccccatgcatggaaccctgatatttggtaaacaaggaacaaatgctaacgacgcggatttggacaatgtcatgattacagatgaagaagaaatccgcaccaccaatcccgtggctacggagcagtacgggactgtgtcaaataatttgcaaaactcaaatactggtccaactactggaactgtcaatcaccaaggagcgttacctggtatggtgtggcaggatcgagacgtgtacctgcagggacccatttgggccaagattcctcacaccgatggacactttcatccttctccactgatgggaggttttggactcaaacacccgcctcctcagatcatgatcaaaaacactcccgttccagccaatcctcctacaaacttcagttctgccaagtttgcttccttcatcacacagtattccacgggacaagtcagcgtggagattgagtgggagctgcagaaggagaacagcaaacgctggaaccccgagatccagtacacttccaactacaacaaatctgttaatgtggactttactgtggacactaatggcgtgtattcagagcctcgccccattggcaccagatacctgactcgtaatctgtaa

SEQ ID NO: 4385 - DNA, 2208 bp, Artificial Sequence
  source: /note="Description of Artificial Sequence: Synthetic polynucleotide"
atggctgccgatggttatcttccagattggctcgaggacactctctctgaaggaataagacagtggtggaagctcaaacctggcccaccaccgccaaagcccgcagagcggcacaaggacgacagtaggggtcttgtgcttcctgggtacaagtacctcggacccttcaacggactcgacaaaggagagccggtcaacgaggcagacgccgcggccctcgagcacgacaaggcctacgaccggcagctcgacagcggagacaacccgtacctcaagtacaaccacgccgacgcggagtttcaggagcgtcttaaagaagatacgtcttttgggggcaacctcggacgagcagtattccaggcgaaaaagagggttcttgaacctctgggcctggttgaggagcctgttaagacggctccgggaaaaaagaggccggtagagcactctcctgtggagccagactcctcctcgggaaccggaaaagcgggccagcagcctgcaagaaaaagattgaattttggtcagactggagacgcagactccgtacctgacccccagcctctcggacagccaccagcagcccccacaagtttgggatctactacaatggctacaggcagtggcgcaccaatggcagacaataacgagggtgccgatggagtgggtaattcctcaggaaattggcattgcgattcccaatggctgggcgacagagtcatcaccaccagcacccgaacctgggccctgcccacctacaacaaccacctctacaagcaaatctccagccaatcaggagcatcgaacgacaaccactactttggctacagcaccccttgggggtattttgacttcaacagattccactgtcacttctccccacgtgactggcaaagactcatcaacaacaactggggattccgacccaagagactcaacttcaagctctttaacattcaagtcaaagaggtcacgcagaatgacggtacgacgacgattgccaataaccttaccagcacggttcaggtgtttactgactcggagtaccagctcccgtacgtcctcggctcggcgcatcaaggatgcctcccgccgttcccagcagacgtcttcatggtcccacagtatggatacctcaccctgaacaacgggagtcaggcggtaggacgctcttccttttactgcctggagtactttccttctcagatgcttcgtaccggaaacaactttaccttcagctacacctttgaagacgtgcctttccacagtagctacgctcacagccagagtctggatcggctgatgaatcctcttatcgaccagtacctgtattatctaaacaaaacacaatcaaatagtggaactcttcagcagtctcggctactgtttagtcaagctggacccaccagcatgtctcttcaagctaaaaactggctgcctggaccttgctacagacaacagcgtctgtcaaagcaggcaaacgacaacaacaacagcaactttccctggactgcggctacaaagtatcatctaaatggccgggactcgttggttaatccaggaccagctatggccagccacaaagacgatgaagaaaagtttttccccatgcatggaaccctgatatttggtaaacaaggaacaaatgctaacgacgcggatttggacaatgtcatgattacagatgaagaagaaatccgcaccaccaatcccgtggctacggagcagtacgggactgtgtcaaataatttgcaaaactcaaatactggtccaactactggaactgtcaatcaccaaggagcgttacctggtatggtgtggcaggatcgagacgtgtacctgcagggacccatttgggccaagattcctcacaccgatggacactttcatccttctccactgatgggaggttttggactcaaacacccgcctcctcagatcatgatcaaaaacactcccgttccagccaatcctcctacaaacctcagttctgccaagtttgcttccttcatcacacagtattccacgggacaagtcagcgtggagattgagtgggagctgcagaaggagaacagcaaacgctggaaccccgagatccagtacacttccaactacaacaaatctgttaatgtggactttactgtggacactaatggcgtgtattcagagcctcgccccattggcaccagatacctgactcgtaatctgtaa

SEQ ID NO: 4386 - DNA, 2208 bp, Artificial Sequence
  source: /note="Description of Artificial Sequence: Synthetic polynucleotide"
atggctgccgatggttatcttccagattggctcgaggacactctctctgaaggaataagacagtggtggaagctcaaacctggcccaccaccgccaaagcccgcagagcggcacaaggacgacagtaggggtcttgtgcttcctgggtacaagtacctcggacccttcaacggactcgacaaaggagagccggtcaacgaggcagacgccgcggccctcgagcacgacaaggcctacgaccggcagctcgacagcggagacaacccgtacctcaagtacaaccacgccgacgcggagtttcaggagcgtcttaaagaagatacgtcttttgggggcaacctcggacgagcagtattccaggcgaaaaagagggttcttgaacctctgggcctggttgaggagcctgttaagacggctccgggaaaaaagaggccggtagagcactctcctgtggagccagactcctcctcgggaaccggaaaagcgggccagcagcctgcaagaaaaagattgaattttggtcagactggagacgcagactccgtacctgacccccagcctctcggacagccaccagcagcccccacaagtttgggatctactacaatggctacaggcagtggcgcaccaatggcagacaataacgagggtgccgatggagtgggtaattcctcaggaaattggcattgcgattcccaatggctgggcgacagagtcatcaccaccagcacccgaacctgggccctgcccacctacaacaaccacctctacaagcaaatctccagccaatcaggagcatcgaacgacaaccactactttggctacagcaccccttgggggtattttgacttcaacagattccactgtcacttctccccacgtgactggcaaagactcatcaacaacaactggggattccgacccaagagactcaacttcaagctctttaacattcaagtcaaagaggtcacgcagaatgacggtacgacgacgattgccaataaccttaccagcacggttcaggtgtttactgactcggagtaccagctcccgtacgtcctcggctcggcgcatcaaggatgcctcccgccgttcccagcagacgtcttcatggtcccacagtatggatacctcaccccgaacaacgggagtcaggcggtaggacgctcttccttttactgcctggagtactttccttctcagatgcttcgtaccggaaacaactttaccttcagctacacctttgaagacgtgcctttccacagtagctacgctcacagccagagtctggatcggctgatgaatcctcttatcgaccagtacctgtattatctaaacaaaacacaatcaaatagtggaactcttcagcagtctcggctactgtttagtcaagctggacccaccagcatgtctcttcaagctaaaaactggctgcctggaccttgctacagacaacagcgtctgtcaaagcaggcaaacgacaacaacaacagcaactttccctggactgcggctacaaagtatcatctaaatggccgggactcgttggttaatccaggaccagctatggccagccacaaagacgatgaagaaaagtttttccccatgcatggaaccctgatatttggtaaacaaggaacaaatgctaacgacgcggatttggacaatgtcatgattacagatgaagaagaaatccgcaccaccaatcccgtggctacggagcagtacgggactgtgtcaaataatttgcaaaactcaaatactggtccaactactggaactgtcaatcaccaaggagcgttacctggtatggtgtggcaggatcgagacgtgtacctgcagggacccatttgggccaagattcctcacaccgatggacactttcatccttctccactgatgggaggttttggactcaaacacccgcctcctcagatcatgatcaaaaacactcccgttccagccaatcctcctacaaacttcagttctgccaagtttgcttccttcatcacacagtattccacaggacaagtcagcgtggagattgagtgggagctgcagaaggagaacagcaaacgctggaaccccgagatccagtacacttccaactacaacaaatctgttaatgtggactttactgtggacactaatggcgtgtattcagagcctcgccccattggcaccagatacctgactcgtaatctgtaa

SEQ ID NO: 4387 - DNA, 2208 bp, Artificial Sequence
  source: /note="Description of Artificial Sequence: Synthetic polynucleotide"
atggctgccgatggttatcttccagattggctcgaggacactctctctgaaggaataagacagtggtggaagctcaaacctggcccaccaccgccaaagcccgcagagcggcacaaggacgacagtaggggtcttgtgcttcctgggtacaagtacctcggacccttcaacggactcgacaaaggagagccggtcaacgaggcagacgccgcggccctcgagcacgacaaggcctacgaccggcagctcgacagcggagacaacccgtacctcaagtacaaccacgccgacgcggagtttcaggagcgtcttaaagaagatacgtcttttgggggcaacctcggacgagcagtattccaggcgaaaaagagggttcttgaacctctgggcctggttgaggagcctgttaagacggctccgggaaaaaagaggccggtagagcactctcctgtggagccagactcctcctcgggaaccggaaaagcgggccagcagcctgcaagaaaaagattgaattttggtcagactggagacgcagactccgtacctgacccccagcctctcggacagccaccagcagcccccacaagtttgggatctactacaatggctacaggcagtggcgcaccaatggcagacaataacgagggtgccgatggagtgggtaattcctcaggaaattggcattgcgattcccaatggctgggcgacagagtcatcaccaccagcacccgaacctgggccctgcccacctacaacaaccacctctacaagcaaatctccagccaatcaggagcatcgaacgacaaccactactttggctacagcaccccttgggggtattttgacttcaacagattccactgtcacttctccccacgtgactggcaaagactcatcaacaacaactggggattccgacccaagagactcaacttcaagctctttaacattcaagtcaaagaggtcacgcagaatgacggtacgacgacgattgccaataaccttaccagcacggttcaggtgtttactgactcggagtaccagctcccgtacgtcctcggctcggcgcatcaaggatgcctcccgccgttcccagcagacgtcttcatggtcccacagtatggatacctcaccctgaacaacgggagtcaggcggtaggacgctcttccttttactgcctggagtactttccttctcagatgcttcgtaccggaaacaactttaccttcagctacacctttgaagacgtgcctttccacagtagctacgctcacagccagagtctggatcggctgatgaatcctcttatcgaccagtacctgtattatctaaacaaaacacaatcaaatagtggaactcttcggcagtctcggctactgtttagtcaagctggacccaccagcatgtctcttcaagctaaaaactggctgcctggaccttgctacagacaacagcgtctgtcaaagcaggcaaacgacaacaacaacagcaactttccctggactgcggctacaaagtatcatctaaatggccgggactcgttggttaatccaggaccagctatggccagccacaaagacgatgaaggaaagtttttccccatgcatggaaccctgatatttggtaaacaaggaacaaatgctaacgacgcggatttggacaatgtcatgattacagatgaagaagaaatccgcaccaccaatcccgtggctacggagcagtacgggactgtgtcaaataatttgcaaaactcaaatactggtccaactactggaactgtcaatcaccaaggagcgttacctggtatggtgtggcaggatcgagacgtgtacctgcagggacccatttgggccaagattcctcacaccgatggacactttcatccttctccactgatgggaggttttggactcaaacacccgcctcctcagatcatgatcaaaaacactcccgttccagccaatcctcctacaaacttcagttctgccaagtttgcttccttcatcacacagtattccacaggacaagtcagcgtggagattgagtgggagctgcagaaggagaacagcaaacgctggaaccccgagatccagtacacttccaactacaacaaatctgttaatgtggactttactgtggacactaatggcgtgtattcagagcctcgccccattggcaccagatacctgactcgtaatctgtaa

SEQ ID NO: 4388 - DNA, 2208 bp, Artificial Sequence
  source: /note="Description of Artificial Sequence: Synthetic polynucleotide"
atggctgccgatggttatcttccagattggctcgaggacactctctctgaaggaataagacagtggtggaagctcaaacctggcccaccaccgccaaagcccgcagagcggcacaaggacgacagtaggggtcttgtgcttcctgggtacaagtacctcggacccttcaacggactcgacaaaggagagccggtcaacgaggcagacgccgcggccctcgagcacgacaaggcctacgaccggcagctcgacagcggagacaacccgtacctcaagtacaaccacgccgacgcggagtttcaggagcgtcttaaagaagatacgtcttttgggggcaacctcggacgagcagtattccaggcgaaaaagagggttcttgaacctctgggcctggttgaggagcctgttaagacggctccgggaaaaaagaggccggtagagcactctcctgtggagccagactcctcctcgggaaccggaaaagcgggccagcagcctgcaagaaaaagattgaattttggtcagactggagacgcagactccgtacctgacccccagcctctcggacagccaccagcagcccccacaagtttgggatctactacaatggctacaggcagtggcgcaccaatggcagacaataacgagggtgccgatggagtgggtaattcctcaggaaattggcattgcgattcccaatggctgggcgacagagtcatcaccaccagcacccgaacctgggccctgcccacctacaacaaccacctctacaagcaaatctccagccaatcaggagcatcgaacgacaaccactactttggctacagcaccccttgggggtattttgacttcaacagattccactgtcacttctccccacgtgactggcaaagactcatcaacaacaactggggattccgacccaagagactcaacttcaagctctttaacattcaagtcaaagaggtcacgcagaatgacggtacgacgacgattgccaataaccttaccagcacggttcaggtgtttactgactcggagtaccagctcccgtacgtcctcggctcggcgcatcaaggatgcctcccgccgttcccagcagacgtcttcatggtcccacagtatggatacctcaccctgaacaacgggagtcaggcggtaggacgctcttccttttactgcctggagtactttccttctcagatgcttcgtaccggaaacaactttaccttcagctacacctttgaagacgtgcctttccacagtagctacgctcacagccagagtctggatcggctgatgaatcctcttatcgaccagtacctgtattatctaaacaaaacacaatcaaatagtggaactcttcagcagtctcggctactgtttagtcaagctggacccaccagcatgtctcttcaagctaaaaactggctgcctggaccttgctacagacaacagcgtctgtcaaagcaggcaaacgacaacaacaacagcaactttccctggactgcggctacaaagtatcatctaaatggccgggactcgttggttaatccaggaccagctatggccagccacaaagacgatgaagaaaagtttttccccatgcatggaaccctgatatttggtaaacaaggaacaaatgctaacgacgcggatttggacaatgccatgattacagatgaagaagaaatccgcaccaccaatcccgtggctacggagcagtacgggactgtgtcaaataatttgcaaaactcaaatactggtccaactactggaactgtcaatcaccaaggagcgttacctggtatggtgtggcaggatcgagacgtgtacctgcagggacccatttgggccaagattcctcacaccgatggacactttcatccttctccactgatgggaggttttggactcaaacacccgcctcctcagatcatgatcaaaaacactcccgttccagccaatcctcctacaaacttcagttctgccaagtttgcttccttcatcacacagtattccacaggacaagtcagcgtggagattgagtgggagctgcagaaggagaacagcaaacgctggaaccccgagatccagtacacttccaactacaacaaatctgttaatgtggactttactgtggacactaatggcgtgtattcagagcctcgccccattggcaccagatacctgactcgtaatctgtaa

SEQ ID NO: 4389 - DNA, 2208 bp, Artificial Sequence
  source: /note="Description of Artificial Sequence: Synthetic polynucleotide"
atggctgccgatggttatcttccagattggctcgaggacactctctctgaaggaataagacagtggtggaagctcaaacctggcccaccaccgccaaagcccgcagagcggcacaaggacgacagtaggggtcttgtgcttcctgggtacaagtacctcggacccttcaacggactcgacaaaggagagccggtcaacgaggcagacgccgcggccctcgagcacgacaaggcctacgaccggcagctcgacagcggagacaacccgtacctcaagtacaaccacgccgacgcggagtttcaggagcgtcttaaagaagatacgtcttttgggggcaacctcggacgagcagtattccaggcgaaaaagagggttcttgaacctctgggcctggttgaggagcctgttaagacggctccgggaaaaaagaggccggtagagcactctcctgtggagccagactcctcctcgggaaccggaaaagcgggccagcagcctgcaagaaaaagattgaattttggtcagactggagacgcagactccgtacctgacccccagcctctcggacagccaccagcagcccccacaagtttgggatctactacaatggctacaggcagtggcgcaccaatggcaggcaataacgagggtgccgatggagtgggtaattcctcaggaaattggcattgcgattcccaatggctgggcgacagagtcatcaccaccagcacccgaacctgggccctgcccacctacaacaaccacctctacaagcaaatctccagccaatcaggagcatcgaacgacaaccactactttggctacagcaccccttgggggtattttgacttcaacagattccactgtcacttctccccacgtgactggcaaagactcatcaacaacaactggggattccgacccaagagactcaacttcaagctctttaacattcaagtcaaagaggtcacgcagaatgacggtacgacgacgattgccaataaccttaccagcacggttcaggtgtttactgactcggagtaccagctcccgtacgtcctcggctcggcgcatcaaggatgcctcccgccgttcccagcagacgtcttcatggtcccacagtatggatacctcaccctgaacaacgggagtcaggcggtaggacgctcttccttttactgcctggagtactttccttctcagatgcttcgtaccggaaacaactttaccttcagctacacctttgaagacgtgcctttccacagtagctacgctcacagccagagtctggatcggctgatgaatcctcttatcgaccagtacctgtattatctaaacaaaacacaatcaaatagtggaactcttcagcagtctcggctactgtttagtcaagctggacccaccagcatgtctcttcaagctaaaaactggctgcctggaccttgctacagacaacagcgtctgtcaaagcaggcaaacgacaacaacaacagcaactttccctggactgcggctacaaagtatcatctaaatggccgggactcgttggttaatccaggaccagctatggccagccacaaagacgatgaagaaaagtttttccccatgcatggaaccctgatatttggtaaacaaggaacaaatgctaacgacgcggatttggacaatgtcatgattacagatgaagaagaaatccgcaccaccaatcccgtggctacggagcagtacgggactgtgtcaaataatttgcaaaactcaaatactggtccaactactggaactgtcaatcaccaaggagcgttacctggtatggtgtggcaggatcgagacgtgtacctgcagggacccatttgggccaagattcctcacaccgatggacactttcatccttctccactgatgggaggttttggactcaaacacccgcctcctcagatcatgatcaaaaacactcccgttccagccaatcctcctacaaacttcagttctgccaagtttgcttccttcatcacacagtattccacaggacaagtcagcgtggagattgagtgggagctgcagaaggagaacagcaaacgctggaaccccgagatccagtacacttccaactacaacaaatctgttaatgtggactttactgtggacactaatggcgtgtattcagagcctcgccccattggcaccagatacctgactcgtaatctgtaa

SEQ ID NO: 4390 - DNA, 2208 bp, Artificial Sequence
  source: /note="Description of Artificial Sequence: Synthetic polynucleotide"
atggctgccgatggttatcttccagattggctcgaggacactctctctgaaggaataagacagtggtggaagctcaaacctggcccaccaccgccaaagcccgcagagcggcacaaggacgacagtaggggtcttgtgcttcctgggtacaagtacctcggacccttcaacggactcgacaaaggagagccggtcaacgaggcagacgccgcggccctcgagcacgacaaggcctacgaccggcagctcgacagcggagacaacccgtacctcaagtacaaccacgccgacgcggagtttcaggagcgtcttaaagaagatacgtcttttgggggcaacctcggacgagcagtattccaggcgaaaaagagggttcttgaacctctgggcctggttgaggagcctgttaagacggctccgggaaaaaagaggccggtagagcactctcctgtggagccagactcctcctcgggaaccggaaaagcgggccagcagcctgcaagaaaaagattgaattttggtcagactggagacgcagactccgtacctgacccccagcctctcggacagccaccagcagcccccacaagtttgggatctactacaatggctacaggcagtggcgcaccaatggcagacaataacgagggtgccgatggagtgggtaattcctcaggaaattggcattgcgattcccaatggctgggcgacagagtcatcaccaccagcacccgaacctgggccctgcccacctacaacaaccacctctacaagcaaatctccagccaatcaggagcatcgaacgacaaccactactttggctacagcaccccttgggggtattttgacttcaacagattccactgtcacttctccccacgtgactggcaaagactcatcaacaacaactggggattccgacccaagagactcaacttcaagctctttaacattcaagtcaaagaggtcgcgcagaatgacggtacgacgacgattgccaataaccttaccagcacggttcaggtgtttactgactcggagtaccagctcccgtacgtcctcggctcggcgcatcaaggatgcctcccgccgttcccagcagacgtcttcatggtcccacagtatggatacctcaccctgaacaacgggagtcaggcggtaggacgctcttccttttactgcctggagtactttccttctcagatgcttcgtaccggaaacaactttaccttcagctacacctttgaagacgtgcctttccacagtagctacgctcacagccagagtctggatcggctgatgaatcctcttatcgaccagtacctgtattatctaaacaaaacacaatcaaatagtggaactcttcagcagtctcggctactgtttagtcaagctggacccaccagcatgtctcttcaagctaaaaactggctgcctggaccttgctacagacaacagcgtctgtcaaagcaggcaaacgacaacaacaacagcaactttccctggactgcggctacaaagtatcatctaaatggccgggactcgttggttaatccaggaccagctatggccagccacaaagacgatgaagaaaagtttttccccatgcatggaaccctgatatttggtaaacaaggaacaaatgctaacgacgcggatttggacaatgtcatgattacagatgaagaagaaatccgcaccaccaatcccgtggctacggagcagtacgggactgtgtcaaataatttgcaaaactcaaatactggtccaactactggaactgtcaatcaccaaggagcgttacctggtatggtgtggcaggatcgagacgtgtacctgcagggacccatttgggccaagattcctcacaccgatggacactttcatccttctccactgatgggaggttttggactcaaacacccgcctcctcagatcatgatcaaaaacactcccgttccagccaatcctcctacaaacttcagttctgccaagtttgcttccttcatcacacagtattccacaggacaagtcagcgtggagattgagtgggagctgcagaaggagaacagcaaacgctggaaccccgagatccagtacacttccaactacaacaaatctgttaatgtggactttactgtggacactaatggcgtgtattcagagcctcgccccattggcaccagatacctgactcgtaatctgtaa

SEQ ID NO: 4391 - DNA, 2208 bp, Artificial Sequence
  source: /note="Description of Artificial Sequence: Synthetic polynucleotide"
atggctgccgatggttatcttccagattggctcgaggacactctctctgaaggaataagacagtggtggaagctcaaacctggcccaccaccgccaaagcccgcagagcggcacaaggacgacagtaggggtcttgtgcttcctgggtacaagcacctcggacccttcaacggactcgacaaaggagagccggtcaacgaggcagacgccgcggccctcgagcacgacaaggcctacgaccggcagctcgacagcggagacaacccgtacctcaagtacaaccacgccgacgcggagtttcaggagcgtcttaaagaagatacgtcttttgggggcaacctcggacgagcagtattccaggcgaaaaagagggttcttgaacctctgggcctggttgaggagcctgttaagacggctccgggaaaaaagaggccggtagagcactctcctgtggagccagactcctcctcgggaaccggaaaagcgggccagcagcctgcaagaaaaagattgaattttggtcagactggagacgcagactccgtacctgacccccagcctctcggacagccaccagcagcccccacaagtttgggatctactacaatggctacaggcagtggcgcaccaatggcagacaataacgagggtgccgatggagtgggtaattcctcaggaaattggcattgcgattcccaatggctgggcgacagagtcatcaccaccagcacccgaacctgggccctgcccacctacaacaaccacctctacaagcaaatctccagccaatcaggagcatcgaacgacaaccactactttggctacagcaccccttgggggtattttgacttcaacagattccactgtcacttctccccacgtgactggcaaagactcatcaacaacaactggggattccgacccaagagactcaacttcaagctctttaacattcaagtcaaagaggtcacgcagaatgacggtacgacgacgattgccaataaccttaccagcacggttcaggtgtttactgactcggagtaccagctcccgtacgtcctcggctcggcgcatcaaggatgcctcccgccgttcccagcagacgtcttcatggtcccacagtatggatacctcaccctgaacaacgggagtcaggcggtaggacgctcttccttttactgcctggagtactttccttctcagatgcttcgtaccggaaacaactttaccttcagctacacctttgaagacgtgcctttccacagtagctacgctcacagccagagtctggatcggctgatgaatcctcttatcgaccagtacctgtattatctaaacaaaacacaatcaaatagtggaactcttcagcagtctcggctactgtttagtcaagctggacccaccagcatgtctcttcaagctaaaaactggctgcctggaccttgctacagacaacagcgtctgtcaaagcaggcaaacgacaacaacaacagcaactttccctggactgcggctacaaagtatcatctaaatggccgggactcgttggttaatccaggaccagctatggccagccacaaagacgatgaagaaaagtttttccccatgcatggaaccctgatatttggtaaacaaggaacaaatgctaacgacgcggatttggacaatgtcatgattacagatgaagaagaaatccgcaccaccaatcccgtggctacggagcagtacgggactgtgtcaaataatttgcaaaactcaaatactggtccaactactggaactgtcaatcaccaaggagcgttacctggtatggtgtggcaggatcgagacgtgtacctgcagggacccatttgggccaagattcctcacaccgatggacactttcatccttctccactgatgggaggttttggactcaaacacccgcctcctcagatcatgatcaaaaacactcccgttccagccaatcctcctacaaacttcagttctgccaagtttgcttccttcatcacacagtattccacaggacaagtcagcgtggagattgagtgggagctgcagaaggagaacagcaaacgctggaaccccgagatccagtacacttccaactacaacaaatctgttaatgtggactttactgtggacactaatggcgtgtattcagagcctcgccccattggcaccagatacctgactcgtaatctgtaa

SEQ ID NO: 4392 - DNA, 2208 bp, Artificial Sequence
  source: /note="Description of Artificial Sequence: Synthetic polynucleotide"
atggctgccgatggttatcttccagattggcccgaggacactctctctgaaggaataagacagtggtggaagctcaaacctggcccaccaccgccaaagcccgcagagcggcacaaggacgacagtaggggtcttgtgcttcctgggtacaagtacctcggacccttcaacggactcgacaaaggagagccggtcaacgaggcagacgccgcggccctcgagcacgacaaggcctacgaccggcagctcgacagcggagacaacccgtacctcaagtacaaccacgccgacgcggagtttcaggagcgtcttaaagaagatacgtcttttgggggcaacctcggacgagcagtattccaggcgaaaaagagggttcttgaacctctgggcctggttgaggagcctgttaagacggctccgggaaaaaagaggccggtagagcactctcctgtggagccagactcctcctcgggaaccggaaaagcgggccagcagcctgcaagaaaaagattgaattttggtcagactggagacgcagactccgtacctgacccccagcctctcggacagccaccagcagcccccacaagtttgggatctactacaatggctacaggcagtggcgcaccaatggcagacaataacgagggtgccgatggagtgggtaattcctcaggaaattggcattgcgattcccaatggctgggcgacagagtcatcaccaccagcacccgaacctgggccctgcccacctacaacaaccacctctacaagcaaatctccagccaatcaggagcatcgaacgacaaccactactttggctacagcaccccttgggggtattttgacttcaacagattccactgtcacttctccccacgtgactggcaaagactcatcaacaacaactggggattccgacccaagagactcaacttcaagctctttaacattcaagtcaaagaggtcacgcagaatgacggtacgacgacgattgccaataaccttaccagcacggttcaggtgtttactgactcggagtaccagctcccgtacgtcctcggctcggcgcatcaaggatgcctcccgccgttcccagcagacgtcttcatggtcccacagtatggatacctcaccctgaacaacgggagtcaggcggtaggacgctcttccttttactgcctggagtactttccttctcagatgcttcgtaccggaaacaactttaccttcagctacacctttgaagacgtgcctttccacagtagctacgctcacagccagagtctggatcggctgatgaatcctcttatcgaccagtacctgtattatctaaacaaaacacaatcaaatagtggaactcttcagcagtctcggctactgtttagtcaagctggacccaccagcatgtctcttcaagctaaaaactggctgcctggaccttgctacagacaacagcgtctgtcaaagcaggcaaacgacaacaacaacagcaactttccctggactgcggctacaaagtatcatctaaatggccgggactcgttggttaatccaggaccagctatggccagccacaaagacgatgaagaaaagtttttccccatgcatggaaccctgatatttggtaaacaaggaacaaatgctaacgacgcggatttggacaatgtcatgattacagatgaagaagaaatccgcaccaccaatcccgtggctacggagcagtacgggactgtgtcaaataatttgcaaaactcaaatactggtccaactactggaactgtcaatcaccaaggagcgttacctggtatggtgtggcaggatcgagacgtgtacctgcagggacccatttgggccaagattcctcacaccgatggacactttcatccttctccactgatgggaggttttggactcaaacacccgcctcctcagatcatgatcaaaaacactcccgttccagccaatcctcctacaaacttcagttctgccaagtttgcttccttcatcacacagtattccacaggacaagtcagcgtggagattgagtgggagctgcagaaggagaacagcaaacgctggaaccccgagatccagtacacttccaactacaacaaatctgttaatgtggactttactgtggacactaatggcgtgtattcagagcctcgccccattggcaccagatacctgactcgtaatctgtaa

SEQ ID NO: 4393 - DNA, 2208 bp, Artificial Sequence
  source: /note="Description of Artificial Sequence: Synthetic polynucleotide"
atggctgccgatggttatcttccagattggctcgaggacactctctctgaaggaataagacagtggtggaagctcaaacctggcccaccaccgccaaagcccgcagagcggcacaaggacgacagtaggggtcttgtgcttcctgggtacaagtacctcggacccttcaacggactcgacaaaggagagccggtcaacgaggcagacgccgcggccctcgagcacgacaaggcctacgaccggcagctcgacagcggagacaacccgtacctcaagtacaaccacgccgacgcggagtttcaggagcgtcttaaagaagatacgtcttttgggggcaacctcggacgagcagtattccaggcgaaaaagagggttcttgaacctctgggcctggttgaggagcctgttaagacggctccgggaaaaaagaggccggtagagcactctcctgtggagccagactcctcctcgggaaccggaaaagcgggccagcagcctgcaagaaaaagattgaattttggtcagactggagacgcagactccgtacctgacccccagcctctcggacagccaccagcagcccccacaagtttgggatctactacaatggctacaggcagtggcgcaccaatggcagacaataacgagggtgccgatggagtgggtaattcctcaggaaattggcattgcgattcccaatggctgggcgacagagtcatcaccaccagcacccgaacctgggccctgcccacctacaacaaccacctctacaagcaaatctccagccaatcaggagcatcgaacgacaaccactactttggctacagcaccccttgggggtattttgacttcaacagattccactgtcacttctccccacgtgactggcaaagactcatcaacaacaactggggattccgacccaagagactcaacttcaagctctttaacattcaagtcaaagaggtcacgcagaatgacggtacgacgacgattgccaataaccttaccagcacggttcaggtgtttactgactcggagtaccagctcccgtacgtcctcggctcggcgcatcaaggatgcctcccgccgttcccagcagacgtcttcatggtcccacagtatggatacctcaccctgaacaacgggagtcaggcggtaggacgctcttccttttactgcctggagtactttccttctcagatgcttcgtaccggaaacaactttaccttcagctacacctttgaagacgtgcctttccacagtagctacgctcacagccagagtctggatcggctgatgaatcctcttatcgaccagtacctgtattatctaaacaaaacacaatcaaatagtggaactcttcagcagtctcggctactgtttagtcaagctggacccaccagcatgtctcttcaagctaaaaactggctgcctggaccttgctacagacaacagcgtctgtcaaagcaggcaaacgacaacaacaacagcaactttccctggactgcggctacaaagtatcatctaaatggccgggactcgttggttaatccaggaccagctatggccagccacaaagacgatgaagaaaagtttttccccatgcatggaaccctgatatttggtaaacaaggaacaaatgctaacgacgcggatttggacaatgtcatgattacagatgaagaagaaatccgcaccaccaatcccgtggctacggagcagtacgggactgtgtcaaataatttgcaaaactcaaatactggtccaactactggaactgtcaatcaccaaggagcgttacctggtatggtgtggcaggatcgaggcgtgtacctgcagggacccatttgggccaagattcctcacaccgatggacactttcatccttctccactgatgggaggttttggactcaaacacccgcctcctcagatcatgatcaaaaacactcccgttccagccaatcctcctacaaacttcagttctgccaagtttgcttccttcatcacacagtattccacgggacaagtcagcgtggagattgagtgggagctgcagaaggagaacagcaaacgctggaaccccgagatccagtacacttccaactacaacaaatctgttaatgtggactttactgtggacactaatggcgtgtattcagagcctcgccccattggcaccagatacctgactcgtaatctgtaa

SEQ ID NO: 4394 - DNA, 2208 bp, Artificial Sequence
  source: /note="Description of Artificial Sequence: Synthetic polynucleotide"
atggctgccgatggttatcttccagattggctcgaggacactctctctgaaggaataagacagtggtggaagctcaaacctggcccaccaccgccaaagcccgcagagcggcacaaggacgacagtaggggtcttgtgcttcctgggtacaagtacctcggacccttcaacggactcgacaaaggagagccggtcaacgaggcagacgccgcggccctcgagcacgacaaggcctacgaccggcagctcgacagcggagacaacccgtacctcaagtacaaccacgccgacgcggagtttcaggagcgtcttaaagaagatacgtcttttgggggcaacctcggacgagcagtattccaggcgaaaaagagggttcttgaacctctgggcctggttgaggagcctgttaagacggctccgggaaaaaagaggccggtagagcactctcctgtggagccagactcctcctcgggaaccggaaaagcgggccagcagcctgcaagaaaaagattgaattttggtcagactggagacgcagactccgtacctgacccccagcctctcggacagccaccagcagcccccacaagtttgggatctactacaatggctacaggcagtggcgcaccaatggcagacaataacgagggtgccgatggagtgggtaattcctcaggaaattggcattgcgattcccaatggctgggcgacagagtcatcaccaccagcacccgaacctgggccctgcccacctacaacaaccacctctacaagcaaatctccagccaatcaggagcatcgaacgacaaccactactttggctacagcaccccttgggggtattttgacttcaacagattccactgtcacttctccccacgtgactggcaaagactcatcaacaacaactggggattccgacccaagagactcaacttcaagctctttaacattcaagtcaaagaggtcacgcagaatgacggtacgacgacgattgccaataaccttaccagcacggttcaggtgtttactgactcggagtaccagctcccgtacgtcctcggctcggcgcatcaaggatgcctcccgccgttcccagcagacgtcttcatggtcccacagtatggatacctcaccctgaacaacgggagtcaggcggtaggacgctcttccttttactgcctggagtactttccttctcagatgcttcgtaccggaaacaactttaccttcagctacacctttgaagacgtgcctttccacagtagctacgctcacagccagagtctggatcggctgatgaatcctcttatcgaccagtacctgtattatctaaacaaaacacaatcaaatagtggaactcttcagcagtctcggctactgtttagtcaagctggacccaccagcatgtctcttcaagctaaaaactggctgcctggaccttgctacagacaacagcgtctgtcaaagcaggcaaacgacaacaacaacagcaactttccctggactgcggctacaaagtatcatctaaatggccgggactcgttggttaatccaggaccagctatggccagccacaaagacgatgaagaaaagtttttccccatgcatggaaccctgatatttggtaaacaaggaacaaatgctaacgacgcggatttggacaatgtcatgattacagatgaagaagaaatccgcaccaccaatcccgtggctacggagcagtacgggactgtgtcaaataatttgcaaaactcaaatactggtccaactactggaactgtcaatcaccaaggagcgttacctggtatggtgtggcaggatcgagacgtgtacctgcagggacccatttgggccaagattcctcacaccgatggacactttcatccttctccactgatgggaggttttggactcaaacacccgcctcctcagatcatgatcaaaaacactcccgttccagccaatcctcctacaaacttcagttctgccaagtttgcttccttcatcacacagtattccacgggacaagtcagcgtggagattgagtgggagctgcagaaggagaacagcaaacgctggaaccccgagatccagtacacttccaactacaacaaatctgttaatgtggactttactgtgggcactaatggcgtgtattcagagcctcgccccattggcaccagatacctgactcgtaatctgtaa

SEQ ID NO: 4395 - DNA, 2208 bp, Artificial Sequence
  source: /note="Description of Artificial Sequence: Synthetic polynucleotide"
atggctgccgatggttatcttccagattggctcgaggacactctctctgaaggaataagacagtggtggaagctcaaacctggcccaccaccaccaaagcccgcagagcggcatcaggacgacagcaggggtcttgtgcttcctgggtacaagtacctcggacccctcaacggactcgacaaaggagagccggtcaacgaggcagacgctgcggccctcgagcacgacaaggcctacgaccggcagctcgacagcggagacaacccgtacctcaagtacaaccacgccgacgcggagtttcaggagcgtcttaaagaagatacgtcttttgggggcaacctcggacgagcagtcttccaggcgaaaaagagggttcttgaacctctgggcctggttgaggaacctgttaagacggctccgggaaaaaagaggccggtagagcactctcctgcggagccagactcctcctcgggaaccggaaaagcgggccagcagcctgcaagaaagagattgaatttcggtcagactggagacgcagactccgtacctgacccccagcctctcggacagccaccagcagcccccacaagtttgggatctactacaatggctacaggcagtggcgcaccaatggcagacaataacgagggtgccgatggagtgggtaattcctcaggaaattggcattgcgattcccaatggctgggcgacagagtcatcaccaccagcacccgaacctgggccctgcccacctacaacaaccacctctacaagcaaatctccagccaatcaggagcatcgaacgacaaccactactttggctacagcaccccttgggggtattttgacttcaacagattccactgtcacttctccccacgtgactggcaaagactcatcaacaacaactggggattccgacccaagagactcaacttcaagctctttaacattcaagtcaaagaggtcacgcagaatgacggtacgacgacgattgccaataaccttaccagcacggttcaggtgtttactgactcggagtaccagctcccgtacgtcctcggctcggcgcatcaaggatgcctcccgccgtttccagcggacgtcttcatggtcccacagtatggatacctcaccctgaacaacgggagtcaggcggtaggacgctcttccttttactgcctggagtactttccttctcagatgctgcgtaccggaaacaactttaccttcagctacacctttgaggacgtgcctttccacagcagctacgctcacagccagagtttggaccggctgatgaatcctctgatcgaccagtatctgtattatctgaacaggacacaatcaaatagtggaactcttcagcagtctaggctactgtttagccaagctggacccaccagcatgtctcttcaagctaaaaactggctgcctggaccttgctacagacagcagcgtctgtcaaagcaggcaaacgacaacaacaacagcaactttccctggactgcggctacaaagtatcatctaaatggtcgggactcgttggttaatccaggaccagctatggccagccacaaagacgatgaagaaaagtttttccccatgcatggaaccctgatatttggtaaacaaggaacaaatgctaacgacgcggatttggaacatgtcatgattacagatgaagaagaaatcaggaccaccaatcccgtggctacagagcagtacggaaacgtgtcaaataatttgcaaaactcaaatactggtccaactacagaaaatgtcaatcaccagggagcgttacctggtatggtgtggcaggatcgagacgtgtacctgcagggacccatttgggccaagattcctcacaccgacggacactttcacccttctccactgatgggaggttttggactcaaacacccgcctcctcaaatcatgatcaaaaacactcctgttccagccaatcctcctacaaacttcagcgcggcaaagtttgcttccttcatcacacagtattccacgggacaggtcagcgtggagatcgagtgggagctgcagaaggagaacagcaaacgctggaaccccgagatccagtacacttccaactacaacaaatctgttaatgtggactttactgtggacactaatggtgtgtattcagagcctcgccccattggcaccagatacctgactcgtaatctgtaa

SEQ ID NO: 4396 - DNA, 2208 bp, Artificial Sequence
  source: /note="Description of Artificial Sequence: Synthetic polynucleotide"
atggctgccgatggttatcttccagattggctcgaggacactctctctgaaggaataagacagtggtggaagctcaaacctggcccaccaccaccaaagcccgcagagcggcatcaggacgacagcaggggtcttgtgcttcctgggtacaagtacctcggacccttcaacggactcgacaaaggagagccggtcaacgaggcagacgctgcggccctcgagcacgacaaggcctacgaccggcagctcgacagcggagacaacccgtacctcaagtacaaccacgccgacgcggagtttcaggagcgtcttaaagaagatacgtcttttgggggcaacctcggacgagcagtcttccaggcgaaaaagagggttcttgaacctctgggcctggttgaggaacctgttaagacggctccgggaaaaaagaggccggtagagcactctcctgcggagccagactcctcctcgggaaccggaaaagcgggccagcagcctgcaagaaagagattgaatttcggtcagactggagacgcagactccgtacctgacccccagcctctcggacagccaccagcagcccccacaagtttgggatctactacaatggctacaggcagtggcgcaccaatggcagacaataacgagggtgccgatggagtgggtaattcctcaggaaattggcattgcgattcccaatggctgggcgacagagtcatcaccaccagcacccgaacctgggccctgcccacctacaacaaccacctctacaagcaaatctccagccaatcaggagcatcgaacgacaaccactactttggctacagcaccccttgggggtattttgacttcaacagattccactgtcacttctccccacgtgactggcaaagactcatcaacaacaactggggattccgacccaagagactcaacttcaagctctttaacattcaagtcaaagaggtcacgcagaatgacggtacgacgacgattgccaataaccttaccagcacgattcaggtgtttactgactcggagtaccagctcccgtacgtcctcggctcggcgcatcaaggatgcctcccgccgtttccagcggacgtcttcatggtcccacagtatggatacctcaccctgaacaacgggagtcaggcggtaggacgctcttccttttactgcctggagtactttccttctcagatgctgcgtaccggaaacaactttaccttcagctacacctttgaggacgtgcctttccacagcagctacgctcacagccagagtttggaccggctgatgaatcctctgatcgaccagtatctgtattatctgaacaggacacaatcaaatagtggaactcttcagcagtctaggctactgtttagccaagctggacccaccagcatgtctcttcaagctaaaaactggctgcctggaccttgctacagacagcagcgtctgtcaaagcaggcaaacgacaacaacaacagcaactttccctggactgcggctacaaagtatcatctaaatggtcgggactcgttggttaatccaggaccagctatggccagccacaaagacgatgaagaaaagtttttccccatgcatggaaccctgatatttggtaaacaaggaacaaatgctaacgacgcggatttggaacatgtcatgattacagatgaagaagaaatcaggaccaccaatcccgtggctacagagcagtacggaaacgtgtcaaataatttgcaaaactcaaatactggtccaactacagaaaatgtcaatcaccagggagcgttacctggtatggtgtggcaggatcgagacgtgtacctgcagggacccatttgggccaagattcctcacaccgacggacactttcacccttctccactgatgggaggttttggactcaaacacccgcctcctcaaatcatgatcaaaaacactcctgttccagccaatcctcctacaaacttcagcgcggcaaagtttgcttccttcatcacacagtattccacgggacaggtcagcgtggagatcgagtgggagctgcagaaggagaacagcaaacgctggaaccccgagatccagtacacttccaactacaacaaatctgttaatgtggactttactgtggacactaatggtgtgtattcagagcctcgccccattggcaccagatacctgactcgtaatctgtaa

SEQ ID NO: 4397 - DNA, 2208 bp, Artificial Sequence
  source: /note="Description of Artificial Sequence: Synthetic polynucleotide"
atggctgccgatggttatcttccagattggctcgaggacactctctctgaaggaataagacagtggtggaagctcaaacctggcccaccaccaccaaagcccgcagagcggcatcaggacgacagcaggggtcttgtgcttcctgggtacaagtacctcggacccttcaacggactcgacaaaggagagccggtcaacgaggcagacgctgcggccctcgagcacgacaaggcctacgaccggcagctcgacagcggagacaacccgtacctcaagtacaaccacgccgacgcggagtttcaggagcgtcttaaagaagatacgtcttttgggggcaacctcggacgagcagtcttccaggcgaaaaagagggttcttgaacctctgggcctggttgaggaacctgttaagacggctccgggaaaaaagaggccggtagggcactctcctgcggagccagactcctcctcgggaaccggaaaagcgggccagcagcctgcaagaaagagattgaatttcggtcagactggagacgcagactccgtacctgacccccagcctctcggacagccaccagcagcccccacaagtttgggatctactacaatggctacaggcagtggcgcaccaatggcagacaataacgagggtgccgatggagtgggtaattcctcaggaaattggcattgcgattcccaatggctgggcgacagagtcatcaccaccagcacccgaacctgggccctgcccacctacaacaaccacctctacaagcaaatctccagccaatcaggagcatcgaacgacaaccactactttggctacagcaccccttgggggtattttgacttcaacagattccactgtcacttctccccacgtgactggcaaagactcatcaacaacaactggggattccgacccaagagactcaacttcaagctctttaacattcaagtcaaagaggtcacgcagaatgacggtacgacgacgattgccaataaccttaccagcacggttcaggtgtttactgactcggagtaccagctcccgtacgtcctcggctcggcgcatcaaggatgcctcccgccgtttccagcggacgtcttcatggtcccacagtatggatacctcaccctgaacaacgggagtcaggcggtaggacgctcttccttttactgcctggagtactttccttctcagatgctgcgtaccggaaacaactttaccttcagctacacctttgaggacgtgcctttccacagcagctacgctcacagccagagtttggaccggctgatgaatcctctgatcgaccagtatctgtattatctgaacaggacacaatcaaatagtggaactcttcagcagtctaggctactgtttagccaagctggacccaccagcatgtctcttcaagctaaaaactggctgcctggaccttgctacagacagcagcgtctgtcaaagcaggcaaacgacaacaacaacagcaactttccctggactgcggctacaaagtatcatctaaatggtcgggactcgttggttaatccaggaccagctatggccagccacaaagacgatgaagaaaagtttttccccatgcatggaaccctgatatttggtaaacaaggaacaaatgctaacgacgcggatttggaacatgtcatgattacagatgaagaagaaatcaggaccaccaatcccgtggctacagagcagtacggaaacgtgtcaaataatttgcaaaactcaaatactggtccaactacagaaaatgtcaatcaccagggagcgttacctggtatggtgtggcaggatcgagacgtgtacctgcagggacccatttgggccaagattcctcacaccgacggacactttcacccttctccactgatgggaggttttggactcaaacacccgcctcctcaaatcatgatcaaaaacactcctgttccagccaatcctcctacaaacttcagcgcggcaaagtttgcttccttcatcacacagtattccacgggacaggtcagcgtggagatcgagtgggagctgcagaaggagaacagcaaacgctggaaccccgagatccagtacacttccaactacaacaaatctgttaatgtggactttactgtggacactaatggtgtgtattcagagcctcgccccattggcaccagatacctgactcgtaatctgtaa

SEQ ID NO: 4398 - DNA, 2208 bp, Artificial Sequence
  source: /note="Description of Artificial Sequence: Synthetic polynucleotide"
atggctgccgatggttatcttccagattggctcgaggacactctctctgaaggaataagacagtggtggaagctcaaacctggcccaccaccaccaaagcccgcagagcggcatcaggacgacagcaggggtcttgtgcttcctgggtacaagtacctcggacccttcaacggactcgacaaaggagagccggtcaacgaggcagacgctgcggccctcgagcacgacaaggcctacgaccggcagctcgacagcggagacaacccgtacctcaagtacaaccacgccgacgcggagtttcaggagcgtcttaaagaagatacgtcttttgggggcaacctcggacgagcagtcttccaggcgaaaaagagggttcttgaacctctgggcctggttgaggaacctgttaagacggctccgggaaaaaagaggccggtagagcactctcctgcggagccagactcctcctcgggaaccggaaaagcgggccagcagcctgcaagaaagagattgaatttcggtcagactggagacgcagactccgtacctgacccccagcctctcggacagccaccagcagcccccacaagtttgggatctactacaatggctacaggcagtggcgcaccaatggcagacaataacgagggtgccgatggagtgggtaattcctcaggaaattggcattgcgattcccaatggctgggcgacagagtcatcaccaccagcacccgaacctgggccctgcccacctacaacaaccacctctacaagcaaatctccagccaatcaggagcatcgaacgacaaccactactttggctacagcaccccttgggggtattttgacttcaacagattccactgtcacttctccccacgtgactggcaaagactcatcaacaacaactggggattccgacccaagagactcaacttcaagctctttaacattcaagtcaaagaggtcacgcagaatgacggtacgacgacgattgccaataaccttaccagcacggttcaggtgtttactgactcggagtaccagctcccgtacgtcctcggctcggcgcatcaaggatgcctcccgccgtttccagcggacgtcttcatggtcccacagtatggatacctcaccctgaacaacgggagtcaggcggtaggacgctcttccttttactgcctggagtactttccttctcagatgctgcgtaccggaaacaactttaccttcagctacacctttgaggacgtgcctttccacagcagctacgctcacagccagagtttggaccggctgatgaatcctctgatcgaccagtatctgtattatctgaacaggacacaatcaaatagtggaactcttcagcagtctaggctactgtttagccaagctggacccaccagcatgtctcttcaagctaaaaactggctgcctggaccttgctacagacagcagcgtctgtcaaagcaggcaaacgacaacaacaacagcaactttccctggactgcggctacaaagtatcatctaaatggtcgggactcgttggttaatccaggaccagctatggccagccacaaagacgatgaagaaaagtttttccccatgcatggaaccctgatatttggtaaacaaggaacaaatgctaacgacgcggatttggaacatgtcatgattacagatgaagaagaaatcaggaccaccaatcccgtggctacagagcagtacggaaacgtgtcaaataatttgcaaaactcaaatactggtccaactacagaaaatgtcaatcaccagggagcgttacctggtatggtgtggcaggatcgagacgtgtacctgcagggacccatttgggccaagattcctcacaccgacggacactttcacccttctccactgatgggaggttttggactcaaacacccgcctcctcaaatcatgatcaaaaacactcctgttccagccaatcctcctacaaacttcagcgcggcaaagtttgcttccttcatcacacagtattccacgggacaggtcagcgtggagatcgagcgggagctgcagaaggagaacagcaaacgctggaaccccgagatccagtacacttccaactacaacaaatctgttaatgtggactttactgtggacactaatggtgtgtattcagagcctcgccccattggcaccagatacctgactcgtaatctgtaa

SEQ ID NO: 4399 - DNA, 2208 bp, Artificial Sequence
  source: /note="Description of Artificial Sequence: Synthetic polynucleotide"
atggctgccgatggttatcttccagattggctcgaggacactctctctgaaggaataagacagtggtggaagctcaaacctggcccaccaccaccaaagcccgcagagcggcatcaggacgacagcaggggtcttgtgcttcctgggtacaagtacctcggacccttcaacggactcgacaaaggagagccggtcaacgaggcagacgctgcggccctcgagcacgacaaggcctacgaccggcagctcgacagcggagacaacccgtacctcaagtacaaccacgccgacgcggagtttcaggagcgtcttaaagaagatacgtcttttgggggcaacctcggacgagcagtcttccaggcgaaaaagagggttcttgaacctctgggcctggttgaggaacctgttaagacggctccgggaaaaaagaggccggtagagcactctcctgcggagccagactcctcctcgggaaccggaaaagcgggccagcagcctgcaagaaagagattgaatttcggtcagactggagacgcagactccgtacctgacccccagcctctcggacagccaccagcagcccccacaagtttgggatctactacaatggctacaggcagtggcgcaccaatggcagacaataacgagggtgccgatggagtgggtaattcctcaggaaattggcattgcgattcccaatggctgggcgacagagtcatcaccaccagcacccgaacctgggccctgcccacctacaacaaccacctctacaagcaaatctccagccaatcaggagcatcgaacgacaaccactactttggctacagcaccccttgggggtattttgacttcaacagattccactgtcacttctccccacgtgactggcaaagactcatcaacaacaactggggattccgacccaagagactcaacttcaagctctttaacattcaagtcaaagaggtcacgcagaatgacggtacgacgacgattgccaataaccttaccagcacggttcaggtgtttactgactcggagtaccagctcccgtacgtcctcggctcggcgcatcaaggatgcctcccgccgtttccagcggacgtcttcatggtcccacagtatggatacctcaccctgaacaacgggagtcaggcggtaggacgctcttccttttactgcctggagtactttccttctcagatgctgcgtaccggaaacaactttaccttcagctacacctttgaggacgtgcctttccacagcagctacgctcacagccagagtttggaccggctgatgaatcctctgatcgaccagtatctgtattatctgaacaggacacaatcaaatagtggaactcttcagcagtctaggctactgtttagccaagctggacccaccagcatgtctcttcaagctaaaaactggctgcctggaccttgctacagacagcagcgtctgtcaaagcaggcaaacgacaacaacaacagcaactttccctggactgcggctacaaagtatcatctaaatggtcgggactcgttggttaatccaggaccagctatggccagccacaaagacgatgaagaaaagtttttccccatgcatggaaccctgatatttggtaaacaaggaacaaatgctaacgacgcggatttggaacatgtcatgattacagatgaagaagaaatcaggaccaccaatcccgtggctacagagcagtacggaaacgtgtcaaataatttgcaaaactcaaatactggtccaactacagaaaatgtcaatcaccagggagcgttacctggtatggtgtggcaggatcgagacgtgtacctgcagggacccatttgggccaagattcctcacaccgacggacactttcacccttctccactgatgggaggttttggactcaaacacccgcctcctcaaatcatgatcaaaaacactcctgttccagccaatcctcctacaaacttcagcgcggcaaagtttgcttccttcatcacacagtattccacgggacaggtcagcgtggagatcgagtgggagctgcagaaggagaacagcaaacgctggaaccccgagatccagtacacttccaactacaacaaatctgttaatgtggaccttactgtggacactaatggtgtgtattcagagcctcgccccattggcaccagatacctgactcgtaatctgtaa

SEQ ID NO: 4400 - DNA, 2208 bp, Artificial Sequence
  source: /note="Description of Artificial Sequence: Synthetic polynucleotide"
atggctgccgatggttatcttccagattggctcgaggacactctctctgaaggaataagacagtggtggaagctcaaacctggcccaccaccgccaaagcccgcagagcggcacaaggacgacagtaggggtcttgtgcttcctgggtacaagtacctcggacccttcaacggactcgacaaaggagagccggtcaacgaggcagacgccgcggccctcgagcacgacaaggcctacgaccggcagctcgacagcggagacaacccgtacctcaagtacaaccacgccgacgcggagtttcaggagcgtcttaaagaagatacgtcttttgggggcaacctcggacgagcagtattccaggcgaaaaagagggttcttgaacctctgggcctggttgaggagcctgttaagacggctccgggaaaaaagaggccggtagagcactctcctgtggagccagactcctcctcgggaaccggaaaagcgggccagcagcctgcaagaaaaagattgaattttggtcagactggagacgcagactccgtacctgacccccagcctctcggacagccaccagcagcccccacaagtttgggatctactacaatggctacaggcagtggcgcaccaatggcagacaataacgagggtgccgatggagtgggtaattcctcaggaaattggcattgcgattcccaatggctgggcgacagagtcatcaccaccagcacccgaacctgggccctgcccacctacaacaaccacctctacaagcaaatctccagccaatcaggagcatcgaacgacaaccactactttggccacagcaccccttgggggtattttgacttcaacagattccactgtcacttctccccacgtgactggcaaagactcatcaacaacaactggggattccgacccaagagactcaacttcaagctctttaacattcaagtcaaagaggtcacgcagaatgacggtacgacgacgattgccaataaccttaccagcacggttcaggtgtttactgactcggagtaccagctcccgtacgtcctcggctcggcgcatcaaggatgcctcccgccgttcccagcagacgtcttcatggtcccacagtatggatacctcaccctgaacaacgggagtcaggcggtaggacgctcttccttttactgcctggagtactttccttctcagatgcttcgtaccggaaacaactttaccttcagctacacctttgaagacgtgcctttccacagtagctacgctcacagccagagtctggatcggctgatgaatcctcttatcgaccagtacctgtattatctaaacaaaacacaatcaaatagtggaactcttcagcagtctcggctactgtttagtcaagctggacccaccagcatgtctcttcaagctaaaaactggctgcctggaccttgctacagacaacagcgtctgtcaaagcaggcaaacgacaacaacaacagcaactttccctggactgcggctacaaagtatcatctaaatggccgggactcgttggttaatccaggaccagctatggccagccacaaagacgatgaagaaaagtttttccccatgcatggaaccctgatatttggtaaacaaggaacaaatgctaacgacgcggatttggacaatgtcatgattacagatgaagaagaaatccgcaccaccaatcccgtggctacggagcagtacgggactgtgtcaaataatttgcaaaactcaaatactggtccaactactggaactgtcaatcaccaaggagcgttacctggtatggtgtggcaggatcgagacgtgtacctgcagggacccatttgggccaagattcctcacaccgatggacactttcatccttctccactgatgggaggttttggactcaaacacccgcctcctcagatcatgatcaaaaacactcccgttccagccaatcctcctacaaacttcagttctgccaagtttgcttccttcatcacacagtattccacgggacaagtcagcgtggagattgagtgggagctgcagaaggagaacagcaaacgctggaaccccgagatccagtacacttccaactacaacaaatctgttaatgtggactttactgtggacactaatggcgtgtattcagagcctcgccccattggcaccagatacctgactcgtaatctgtaa

SEQ ID NO: 4401 - DNA, 2208 bp, Artificial Sequence
  source: /note="Description of Artificial Sequence: Synthetic polynucleotide"
atggctgccgatggttatcttccagattggctcgaggacactctctctgaaggaataagacagtggtggaagctcaaacctggcccaccaccgccaaagcccgcagagcggcacaaggacgacagtaggggtcttgtgcttcctgggtacaagtacctcggacccttcaacggactcgacaaaggagagccggtcaacgaggcagacgccgcggccctcgagcacgacaaggcctacgaccggcagctcgacagcggagacaacccgtacctcaagtacaaccacgccgacgcggagtttcaggagcgtcttaaagaagatacgtcttttgggggcaacctcggacgagcagtattccaggcgaaaaagagggttcttgaacctctgggcctggttgaggagcctgttaagacggctccgggaaaaaagaggccggtagagcactctcctgtggagccagactcctcctcgggaaccggaaaagcgggccagcagcctgcaagaaaaagattgaattttggtcagactggagacgcagactccgtacctgacccccagcctctcggacagccaccagcagcccccacaagtttgggatctactacaatggctacaggcagtggcgcaccaatggcagacaataacgagggtgccgatggagtgggtaattcctcaggaaattggcattgcgattcccaatggctgggcgacagagtcatcaccaccagcacccgaacctgggccctgcccacctacaacaaccacctctacaagcaaatctccagccaatcaggagcaccgaacgacaaccactactttggccacagcaccccttgggggtattttgacttcaacagattccactgtcacttctccccacgtgactggcaaagactcatcaacaacaactggggattccgacccaagagactcaacttcaagctctttaacattcaagtcaaagaggtcacgcagaatgacggtacgacgacgattgccaataaccttaccagcacggttcaggtgtttactgactcggagtaccagctcccgtacgtcctcggctcggcgcatcaaggatgcctcccgccgttcccagcagacgtcttcatggtcccacagtatggatacctcaccctgaacaacgggagccaggcggtaggacgctcttccttttactgcctggagtactttccttctcagatgcttcgtaccggaaacaactttaccttcagctacacctttgaagacgtgcctttccacagtagctacgctcacagccagagtctggatcggctgatgaatcctcttatcgaccagtacctgtattatctaaacaaaacacaatcaaatagtggaactcttcagcagtctcggctactgtttagtcaagctggacccaccagcatgtctcttcaagctaaaaactggctgcctggaccttgctacagacaacagcgtctgtcaaagcaggcaaacgacaacaacaacagcaactttccctggactgcggctacaaagtatcatctaaatggccgggactcgttggttaatccaggaccagctatggccagccacaaagacgatgaagaaaagtttttccccatgcatggaaccctgatatttggtaaacaaggaacaaatgctaacgacgcggatttggacaatgtcatgattacagatgaagaagaaatccgcaccaccaatcccgtggctacggagcagtacgggactgtgtcaaataatttgcaaaactcaaatactggtccaactactggaactgtcaatcaccaaggagcgttacctggtatggtgtggcaggatcgagacgtgtacctgcagggacccatttgggccaagattcctcacaccgatggacactttcatccttctccactgatgggaggttttggactcaaacacccgcctcctcagatcatgatcaaaaacactcccgttccagccaatcctcctacaaacttcagttctgccaagtttgcttccttcatcacacagtattccacgggacaagtcagcgtggagattgagtgggagctgcagaaggagaacagcaaacgctggaaccccgagatccagtacacttccaactacaacaaatctgttaatgtggactttactgtggacactaatggcgtgtattcagagcctcgccccattggcaccagatacctgactcgtaatctgtaa

SEQ ID NO: 4402 - DNA, 2208 bp, Artificial Sequence
  source: /note="Description of Artificial Sequence: Synthetic polynucleotide"
atggctgccgatggttatcttccagattggctcgaggacactctctctgaaggaataagacagtggtggaagctcaaacctggcccaccaccgccaaagcccgcagagcggcacaaggacgacagtaggggtcttgtgcttcctgggtacaagtacctcggacccttcaacggactcgacaaaggagagccggtcaacgaggcagacgccgcggccctcgagcacgacaaggcctacgaccggcagctcgacagcggagacaacccgtacctcaagtacaaccacgccgacgcggagtttcaggagcgtcttaaagaagatacgtcttttgggggcaacctcggacgagcagtattccaggcgaaaaagagggttcttgaacctctgggcctggttgaggagcctgttaagacggctccgggaaaaaagaggccggtagagcactctcctgtggagccagactcctcctcgggaaccggaaaagcgggccagcagcctgcaagaaaaagattgaattttggtcagactggagacgcagactccgtacctgacccccagcctctcggacagccaccagcagcccccacaagtttgggatctactacaatggctacaggcagtggcgcaccaatggcagacaataacgagggtgccgatggagtgggtaattcctcaggaaattggcattgcgattcccaatggctgggcgacagagtcatcaccaccagcacccgaacctgggccctgcccacctacaacaaccacctctacaagcaaatctccagccaatcaggagcatcgaacgacaaccactactttggccacagcaccccttgggggtattttgacttcaacagattccactgtcacttctccccacgtgactggcaaagactcatcaacaacaactggggattccgacccaagagactcaacttcaagctctttaacattcaagtcaaagaggtcacgcagaatgacggtacgacgacgattgccaataaccttaccagcacggttcaggtgtttactgactcggagtaccagctcccgtacgtcctcggctcggcgcatcaaggatgcctcccgccgttcccagcagacgtcttcatggtcccacagtatggatacctcaccctgaacaacgggagtcaggcggtaggacgctcttccttttactgcctggagtactttccttctcagatgcttcgtaccggaaacaactttaccttcagctacacctttgaagacgtgcctttccacagtagctacgctcacagccagagtctggatcggctgatgaatcctcttatcgaccagtacctgtattatctaaacaaaacacaatcaaatagtggaactcttcagcagtctcggctactgtttagtcaagctggacccaccagcatgtctcttcaagctaaaaactggctgcctggaccttgctacagacaacagcgtctgtcaaagcaggcaaacgacaacaacaacagcaactttccctggactgcggctacaaagtatcatctaaatggccgggactcgttggttaatccaggaccagctatggccagccacaaagacgatgaagaaaagtttttccccatgcatggaaccctgatatttggtaaacaaggaacaaatgctaacgacgcggatttggacaatgtcatgattacagatgaagaagaaatccgcaccaccaatcccgtggctacggagcagtacgggactgtgtcaaataatttgcaaaactcaaatactggtccaactactggaactgtcaatcaccaaggagcgttacctggtatggtgtggcaggatcgagacgtgtacctgcagggacccatttgggccaagattcctcacaccgatggacactttcatccttctccactgatgggaggttttggactcaaacacccgcctcctcagatcatgatcaaaaacactcccgttccagccaatcctcctacaaacttcagttctgccaagtttgcttccttcatcacacagtattccacaggacaagtcggcgtggagattgagtgggagctgcagaaggagaacagcaaacgctggaaccccgagatccagtacacttccaactacaacaaatctgttaatgtggactttactgtggacactaatggcgtgtattcagagcctcgccccattggcaccagatacctgactcgtaatctgtaa

SEQ ID NO: 4403 - DNA, 2208 bp, Artificial Sequence
  source: /note="Description of Artificial Sequence: Synthetic polynucleotide"
atggctgccgatggttatcttccagattggctcgaggacactctctctgaaggaataagacagtggtggaagctcaaacctggcccaccaccgccaaagcccgcagagcggcacaaggacgacagtaggggtcttgtgcttcctgggtacaagtacctcggacccttcaacggactcgacaaaggagagccggtcaacgaggcagacgccgcggccctcgagcacgacaaggcctacgaccggcagctcgacagcggagacaacccgtacctcaagtacaaccacgccgacgcggagtttcaggagcgtcttaaagaagatacgtcttttgggggcaacctcggacgagcagtattccaggcgaaaaagagggttcttgaacctctgggcctggttgaggagcctgttaagacggctccgggaaaaaagaggccggtagagcactctcctgtggagccagactcctcctcgggaaccggaaaagcgggccagcagcctgcaagaaaaagattgaattttggtcagactggagacgcagactccgtacctgacccccagcctctcggacagccaccagcagcccccacaagtttgggatctactacaatggctacaggcagtggcgcaccaatggcagacaataacgagggtgccgatggagtgggtaattcctcaggaaattggcattgcgattcccaatggctgggcgacagagtcatcaccaccagcacccgaacctgggccctgcccacctacaacaaccacctctacaagcaaatctccagccaatcaggagcatcgaacgacaaccactactttggccacagcaccccttgggggtattttgacttcaacagattccactgtcacttctccccacgtgactggcaaagactcatcaacaacaactggggattccgacccaagagactcaacttcaagctctttaacattcaagtcaaagaggtcacgcagaatgacggtacgacgacgattgccaataaccttaccagcacggttcaggtgtttactgactcggagtaccagctcccgtacgtcctcggctcggcgcatcaaggatgcctcccgccgttcccagcagacgtcttcatggtcccacagtatggatacctcaccctgaacaacgggagtcaggcggtaggacgctcttccttttactgcctggagtactttccttctcagatgcttcgtaccggaaacaactttaccttcagctacacctttgaagacgtgcctttccacagtagctacgctcacagccagagtctggatcggctgatgaatcctcttatcgaccagtacctgtattatctaaacaaaacaaacaatcaaagtggaaccttcacgcagtctcggctactgtttagtcaagctggacccaccagcattctcttcaagtctaaaaactggctgcctggaccttgctacagacaacagcgtctgtcaaagcgggcaaacgacaacaacaacagcaactttccctggactgcggctacaaagtatcatctaaatggccgggactcgttggttaatccaggaccagctatggccagccacaaagacgatgaagaaaagttttttccccagcatggaaccctgatatttggtaaacaaggaacaaagctaacagacgcggatttggacaatgtcatgattacagatgaagaagaaatccgcaccaccaatcccgtggctacggagcagtacgggactgtgtcaaataatttgcagaaactcaacatactggcaactactggaactgtcaacacacaaggagcgttacctggtatggtgtggcaggatcgagacgtgtacctgcagggacccatttgggccaagattcctcacaccgatggacactttcatccttctccactgatgggaggttttggactcaaacacccgcctcctcagatcatgatcaaaaacactcccgttccagccaatcctcctacaaacttcagttctgccaagtttgcttccttcatcacacagtattccacgggacaagtcagcgtggagattgagtgggagctgcagaaggagaacagcaaacgctggaaccccgagatccagtacacttccaactacaacaaatctgttaatgtggactttactgtggacactaatggcgtgtattcagagcctcgccccattggcaccagatacctgactcgtaatctgtaa

SEQ ID NO: 4404 - DNA, 2208 bp, Artificial Sequence
  source: /note="Description of Artificial Sequence: Synthetic polynucleotide"
atggctgccgatggttatcttccagattggctcgaggacactctctctgaaggaataagacagtggtggaagctcaaacctggcccaccaccgccaaagcccgcagagcggcacaaggacgccagtaggggtcttgtgcttcctgggtacaagtacctcggacccttcaacggactcgacaaaggagagccggtcaacgaggcagacgccgcggccctcgagcacgacaaggcctacgaccggcagctcgacagcggagacaacccgtacctcaagtacaaccacgccgacgcggagtttcaggagcgtcttaaagaagatacgtcttttgggggcaacctcggacgagcagtattccaggcgaaaaagagggttcttgaacctctgggcctggttgaggagcctgttaagacggctccgggaaaaaagaggccggtagagcactctcctgtggagccagactcctcctcgggaaccggaaaagcgggccagcagcctgcaagaaaaagattgaattttggtcagactggagacgcagactccgtacctgacccccagcctctcggacagccaccagcagcccccacaagtttgggatctactacaatggctacaggcagtggcgcaccaatggcagacaataacgagggtgccgatggagtgggtaattcctcaggaaattggcattgcgattcccaatggctgggcgacagagtcatcaccaccagcacccgaacctgggccctgcccacctacaacaaccacctctacaagcaaatctccagccaatcaggagcatcgaacgacaaccactactttggctacagcaccccttgggggtattttgacttcaacagattccactgtcacttctccccacgtgactggcaaagactcatcaacaacaactggggattccgacccaagagactcaacttcaagctctttaacattcaagtcaaagaggtcacgcagaatgacggtacgacgacgattgccaataaccttaccagcacggttcaggtgtttactgactcggagtaccagctcccgtacgtcctcggctcggcgcatcaaggatgcctcccgccgttcccagcagacgtcttcatggtcccacagtatggatacctcaccctgaacaacgggagtcaggcggtaggacgctcttccttttactgcctggagtactttccttctcagatgcttcgtaccggaaacaactttaccttcagctacacctttgaagacgtgcctttccacagtagctacgctcacagccagagtctggatcggctgatgaatcctcttatcgaccagtacctgtattatctaaacaaaacaaacaatcaaagtggaaccttcacgcagtctcggctactgtttagtcaagctggacccaccagcattctcttcaagtctaaaaactggctgcctggaccttgctacagacaacagcgtctgtcaaagacagcaaacgacaacaacaacagcaactttccctggactgcggctacaaagtatcatctaaatggccgggactcgttggttaatccaggaccagctatggccagccacaaagacgatgaagaaaagttttttccccagcatggaaccctgatatttggtaaacaaggaacaaagctaacagacgcggatttggacaatgtcatgattacagatgaagaagaaatccgcaccaccaatcccgtggctacggagcagtacgggactgtgtcaaataatttgcagaaactcaacatactggcaactactggaactgtcaacacacaaggagcgttacctggtatggtgtggcaggatcgagacgtgtacctgcagggacccatttgggccaagattcctcacaccgatggacactttcatccttctccactgatgggaggttttggactcaaacacccgcctcctcagatcatgatcaaaaacactcccgttccagccaatcctcctacaaacttcagttctgccaagtttgcttccttcatcacacagtattccacgggacaagtcagcgtggagattgagtgggagctgcagaaggagaacagcaaacgctggaaccccgagatccagtacacttccaactacaacaaatctgttaatgtggactttactgtggacactaatggcgtgtattcagagcctcgccccattggcaccagatacctgactcgtaatctgtaa

SEQ ID NO: 4405 - DNA, 2208 bp, Artificial Sequence
  source: /note="Description of Artificial Sequence: Synthetic polynucleotide"
atggctgccgatggttatcttccagattggctcgaggacactctctctgaaggaataagacagtggtggaagctcaaacctggcccaccaccgccaaagcccgcagagcggcacaaggacgacagtaggggtcttgtgcttcctgggtacaagtacctcggacccttcaacggactcgacaaaggagagccggtcaacgaggcagacgccgcggccctcgagcacgacaaggcctacgaccggcagctcgacagcggagacaacccgtacctcaagtacaaccacgccgacgcggagtttcaggagcgtcttaaagaagatacgtcttttgggggcaacctcggacgagcagtattccaggcgaaaaagagggttcttgaacctctgggcctggttgaggagcctgttaagacggctccgggaaaaaagaggccggtagagcactctcctgtggagccagactcctcctcgggaaccggaaaagcgggccagcagcctgcaagaaaaagattgaattttggtcagactggagacgcagactccgtacctgacccccagcctctcggacagccaccagcagcccccacaagtttgggatctactacaatggctacaggcagtggcgcaccaatggcagacaataacgagggtgccgatggagtgggtaattcctcaggaaattggcattgcgattcccaatggctgggcgacagagtcatcaccaccagcacccgaacctgggccctgcccacctacaacaaccacctctacaagcaaatctccagccaatcaggagcatcgaacgacaaccactactttggccacagcaccccttgggggtattttgacttcaacagattccactgtcacttctccccacgtgactggcaaagactcatcaacaacaactggggattccgacccaagagactcaacttcaagctctttaacattcaagtcaaagaggtcacgcagaatgacggtacgacgacgattgccaataaccttaccagcacggttcaggtgtttactgactcggagtaccagctcccgtacgtcctcggctcggcgcatcaaggatgcctcccgccgttcccagcagacgtcttcatggtcccacagtatggatacctcaccctgaacaacgggagtcaggcggtaggacgctcttccttttactgcctggagtactttccttctcagatgcttcgtaccggaaacaactttaccttcagctacacctttgaagacgtgcctttccacagtagctacgctcacagccagagtctggatcggctgatgaatcctcttatcgaccagtacctgtattatctaaacaaaacaaacaatcaaagtggaaccttcacgcagtctcggctactgtttagtcaagctggacccaccagcattctcttcaagtctaaaaactggctgcctggaccttgctacagacaacagcgtctgtcaaagacagcaaacgacaacaacaacagcaactttccctggactgcggctacaaagtatcatctaaatggccgggactcgttggttaatccaggaccagctatggccagccacaaagacgatgaagaaaagttttttccccagcatggaaccctgatatttggtaaacaaggaacaaagctaacagacgcggatttggacaatgtcatgattacagatgaagaagaaatccgcaccaccaatcccgtggctacggagcagtacgggactgtgtcaaataatttgcagaaactcaacatactggcaactactggaactgtcaacacacaaggagcgttacctggtatggtgtggcaggatcgagacgtgtacctgcagggacccatttgggccaagattcctcacaccgatggacactttcatccttctccactgatgggaggttttggactcaaacacccgcctcctcagatcatgatcaaaaacactcccgttccagccaatcctcctacaaacttcagttctgccaagtttgcttccttcatcacacagtattccacgggacaagtcagcgtggagattgagtgggagctgcagaaggagaacagcaaacgctggaaccccgagatccagtacacttccaactacaacaaatctgttaatgtggactttactgtggacactaatggcgtgtattcagagcctcgccccattggcaccagatacctgactcgtaatctgtaa

SEQ ID NO: 4406 - DNA, 2208 bp, Artificial Sequence
  source: /note="Description of Artificial Sequence: Synthetic polynucleotide"
atggctgccgatggttatcttccagattggctcgaggacactctctctgaaggaataagacagtggtggaagctcaaacctggcccaccaccaccaaagcccgcagagcggcatcaggacgacagcaggggtcttgtgcttcctgggtacaagtacctcggacccttcaacggactcgacaaaggagagccggtcaacgaggcagacgctgcggccctcgagcacgacaaggcctacgaccggcagctcgacagcggagacaacccgtacctcaagtacaaccacgccgacgcggagtttcaggagcgtcttaaagaagatacgtcttttgggggcaacctcggacgagcagtcttccaggcgaaaaagagggttcttgaacctctgggcctggttgaggaacctgttaagacggctccgggaaaaaagaggccggtagagcactctcctgcggagccagactcctcctcgggaaccggaaaagcgggccagcagcctgcaagaaagagattgaatttcggtcagactggagacgcagactccgtacctgacccccagcctctcggacagccaccagcagcccccacaagtttgggatctactacaatggctacaggcagtggcgcaccaatggcagacaataacgagggtgccgatggagtgggtaattcctcaggaaattggcattgcgattcccaatggctgggcgacggagtcatcaccaccagcacccgaacctgggccctgcccacctacaacaaccacctctacaagcaaatctccagccaatcaggagcatcgaacgacaaccactactttggctacagcaccccttgggggtattttgacttcaacagattccactgtcacttctccccacgtgactggcaaagactcatcaacaacaactggggattccgacccaagagactcaacttcaagctctttaacattcaagtcaaagaggtcacgcagaatgacggtacgacgacgattgccaataaccttaccagcacggttcaggtgtttactgactcggagtaccagctcccgtacgtcctcggctcggcgcatcaaggatgcctcccgccgtttccagcggacgtcttcatggtcccacagtatggatacctcaccctgaacaacgggagtcaggcggtaggacgctcttccttttactgcctggagtactttccttctcagatgctgcgtaccggaaacaactttaccttcagctacacctttgaggacgtgcctttccacagcagctacgctcacagccagagtttggaccggctgatgaatcctctgatcgaccagtatctgtattatctgaacaggacacaatcaaatagtggaactcttcagcagtctaggctactgtttagccaagctggacccaccagcatgtctcttcaagctaaaaactggctgcctggaccttgctacagacagcagcgtctgtcaaagcaggcaaacgacaacaacaacagcaactttccctggactgcggctacaaagtatcatctaaatggtcgggactcgttggttaatccaggaccagctatggccagccacaaagacgatgaagaaaagtttttccccatgcatggaaccctgatatttggtaaacaaggaacaaatgctaacgacgcggatttggaacatgtcatgattacagatgaagaagaaatcaggaccaccaatcccgtggctacagagcagtacggaaacgtgtcaaataatttgcaaaactcaaatactggtccaactacagaaaatgtcaatcaccagggagcgttacctggtatggtgtggcaggatcgagacgtgtacctgcagggacccatttgggccaagattcctcacaccgacggacactttcacccttctccactgatgggaggttttggactcaaacacccgcctcctcaaatcatgatcaaaaacactcctgttccagccaatcctcctacaaacttcagcgcggcaaagtttgcttccttcatcacacagtattccacgggacaggtcagcgtggagatcgagtgggagctgcagaaggagaacagcaaacgctggaaccccgagatccagtacacttccaactacaacaaatctgttaatgtggactttactgtggacactaatggtgtgtattcagagcctcgccccattggcaccagatacctgactcgtaatctgtaa

SEQ ID NO: 4407 - DNA, 2208 bp, Artificial Sequence
  source: /note="Description of Artificial Sequence: Synthetic polynucleotide"
atggctgccgatggttatcttccagattggctcgaggacactctctctgaaggaataagacagtggtggaagctcaaacctggcccaccaccaccaaagcccgcagagcggcatcaggacgacagcaggggtcttgtgcttcctgggtacaagtacctcggacccttcaacggactcgacaaaggagagccggtcaacgaggcagacgctgcggccctcgagcacgacaaggcctacgaccggcagctcgacagcggagacaacccgtacctcaagtacaaccacgccgacgcggagtttcaggagcgtcttaaagaagatacgtcttttgggggcaacctcggacgagcagtcttccaggcgaaaaagagggttcttgaacctctgggcctggttgaggaacctgttaagacggctccgggaaaaaagaggccggtagagcactctcctgcggagccagactcctcctcgggaaccggaaaagcgggccagcagcctgcaagaaagagattgaatttcggtcagactggagacgcagactccgtacctgacccccagcctctcggacagccaccagcagcccccacaagtttgggatctactacaatggctacaggcagtggcgcaccaatggcagacaataacgagggtgccgatggagtgggtaattcctcaggaaattggcattgcgattcccaatggctgggcgacagagtcatcaccaccagcacccgaacctgggccctgcccacctacaacaaccacctctacaagcaaatctccagccaatcaggagcatcgaacgacaaccactactttggctacagcaccccttgggggtattttgacttcaacagattccactgtcacttctccccacgtgactggcaaagactcatcaacaacaactggggattccgacccaagagactcaacttcaagctctttaacattcaagtcaaagaggtcacgcagaatgacggtacgacgacgattgccaataaccttaccagcacggttcaggcgtttactgactcggagtaccagctcccgtacgtcctcggctcggcgcatcaaggatgcctcccgccgtttccagcggacgtcttcatggtcccacagtatggatacctcaccctgaacaacgggagtcaggcggtaggacgctcttccttttactgcctggagtactttccttctcagatgctgcgtaccggaaacaactttaccttcagctacacctttgaggacgtgcctttccacagcagctacgctcacagccagagtttggaccggctgatgaatcctctgatcgaccagtatctgtattatctgaacaggacacaatcaaatagtggaactcttcagcagtctaggctactgtttagccaagctggacccaccagcatgtctcttcaagctaaaaactggctgcctggaccttgctacagacagcagcgtctgtcaaagcaggcaaacgacaacaacaacagcaactttccctggactgcggctacaaagtatcatctaaatggtcgggactcgttggttaatccaggaccagctatggccagccacaaagacgatgaagaaaagtttttccccatgcatggaaccctgatatttggtaaacaaggaacaaatgctaacgacgcggatttggaacatgtcatgattacagatgaagaagaaatcaggaccaccaatcccgtggctacagagcagtacggaaacgtgtcaaataatttgcaaaactcaaatactggtccaactacagaaaatgtcaatcaccagggagcgttacctggtatggtgtggcaggatcgagacgtgtacctgcagggacccatttgggccaagattcctcacaccgacggacactttcacccttctccactgatgggaggttttggactcaaacacccgcctcctcaaatcatgatcaaaaacactcctgttccagccaatcctcctacaaacttcagcgcggcaaagtttgcttccttcatcacacagtattccacgggacaggtcagcgtggagatcgagtgggagctgcagaaggagaacagcaaacgctggaaccccgagatccagtacacttccaactacaacaaatctgttaatgtggactttactgtggacactaatggtgtgtattcagagcctcgccccattggcaccagatacctgactcgtaatctgtaa

SEQ ID NO: 4408 - DNA, 2208 bp, Artificial Sequence
  source: /note="Description of Artificial Sequence: Synthetic polynucleotide"
atggctgccgatggttatcttccagattggctcgaggacactctctctgaaggaataagacagtggtggaagctcaaacctggcccaccaccaccaaagcccgcagagcggcatcaggacgacagcaggggtcttgtgcttcctgggtacaagtacctcggacccttcaacggactcgacaaaggagagccggtcaacgaggcagacgctgcggccctcgagcacgacaaggcctacgaccggcagctcgacagcggagacaacccgtacctcaagtacaaccacgccgacgcggagtttcaggagcgtcttaaagaagatacgtcttttgggggcaacctcggacgagcagtcttccaggcgaaaaagagggttcttgaacctctgggcctggttgaggaacctgttaagacggctccgggaaaaaagaggccggtagagcactctcctgcggagccagactcctcctcgggaaccggaaaagcgggccagcagcctgcaagaaagagattgaatttcggtcagactggagacgcagactccgtacctgacccccagcctctcggacagccaccagcagcccccacaagtttgggatctactacaatggctacaggcagtggcgcaccaatggcagacaataacgagggtgccgatggagtgggtaattcctcaggaaattggcattgcgattcccaatggctgggcgacagagtcatcaccaccagcacccgaacctgggccctgcccacctacaacaaccacctctacaagcaaatctccagccaatcaggagcatcgaacgacaaccactactttggctacagcaccccttgggggtattttgacttcaacagattccactgtcacttctccccacgtgactggcaaagactcatcaacaacaactggggattccgacccaagagactcaacttcaagctctttaacattcaagtcaaagaggtcacgcagaatgacggtacgacgacgattgccaataaccttaccagcacggttcaggtgtttactgactcggagtaccagctcccgtacgtcctcggctcggcgcatcaaggatgcctcccgccgtttccagcggacgtcttcatggtcccacagtatggatacctcaccctgaacaacgggagtcaggcggtaggacgctcttccttttactgcctggagtactttccttctcagatgctgcgtaccggaaacaactttaccttcagctacacctttgaggacgtgcctttccacagcagctacgctcacagccagagtttggaccggctgatgaatcctctgatcgaccagtatctgtattatctgaacaggacacaatcaaatagtggaactcttcagcagtctaggctactgtttagccaagctggacccaccagcatgtctcttcaagctaaaaactggctgcctggaccttgctacagacagcagcgtctgtcaaagcaggcaaacgacaacaacaacagcaactttccctggactgcggctacaaagtatcatctaaatggtcgggactcgttggttaatccaggaccagctatggccagccacaaagacgatgaagaaaagtttttccccatgcatggaaccctgatatttggtaaacaaggaacaaatgctaacgacgcggatttggaacatgtcatgattacagatgaagaagaaatcaggaccaccaatcccgtggctacagagcagtacggaaacgtgtcaaataatttgcaaaactcaaatactggtccaactacagaaaatgtcaatcaccagggagcgttacctggtatggtgtggcaggatcgagacgtgtacctgcagggacccatttgggccaagattcctcacaccgacggacactttcacccttctccactgatgggaggttttggactcaaacacccgcctcctcaaatcatgatcaaaaacactcctgttccagccaatcctcctacaaacttcagcgcggcaaagtttgcttccttcatcacacagtattccacgggacaggtcagcgtggagatcgagtgggagctgcagaaggggaacagcaaacgctggaaccccgagatccagtacacttccaactacaacaaatctgttaatgtggactttactgtggacactaatggtgtgtattcagagcctcgccccattggcaccagatacctgactcgtaatctgtaa

SEQ ID NO: 4409 - DNA, 2208 bp, Artificial Sequence
  source: /note="Description of Artificial Sequence: Synthetic polynucleotide"
atggctgccgatggttatcttccagattggctcgaggacactctctctgaaggaataagacagtggtggaagctcaaacctggcccaccaccaccaaagcccgcagagcggcatcaggacgacagcaggggtcttgtgcttcctgggtacaagtacctcggacccttcaacggactcgacaaaggagagccggtcaacgaggcagacgctgcggccctcgagcacgacaaggcctacgaccggcagctcgacagcggagacaacccgtacctcaagtacaaccacgccgacgcggagtttcaggagcgtcttaaagaagatacgtcttttgggggcaacctcggacgagcagtcttccaggcgaaaaagagggttcttgaacctctgggcctggttgaggaacctgttaagacggctccgggaaaaaagaggccggtagagcactctcctgcggagccagactcctcctcgggaaccggaaaagcgggccagcagcctgcaagaaagagattgaatttcggtcagactggagacgcagactccgtacctgacccccagcctctcggacagccaccagcagcccccacaagtttgggatctactacaatggctacaggcagtggcgcaccaatggcagacaataacgagggtgccgatggagtgggtaattcctcaggaaattggcattgcgattcccaatggctgggcgacagagtcatcaccaccagcacccgaacctgggccctgcccacctacaacaaccacctctacaagcaaatctccagccaatcaggagcatcgaacgacaaccactactttggctacagcaccccttgggggtattttgacttcaacagattccactgtcacttctccccacgtgactggcaaagactcatcaacaacaactggggattccgacccaagagactcaacttcaagctctttaacattcaagtcaaagaggtcacgcagaatgacggtacgacgacgattgccaataaccttaccagcacggttcaggtgtttactgactcggagtaccagctcccgtacgtcctcggctcggcgcatcaaggatgcctcccgccgtttccagcggacgtcttcatggtcccacagtatggatacctcaccctgaacaacgggagtcaggcggtaggacgctcttccttttactgcctggagtactttccttctcagatgctgcgtaccggaaacaactttaccttcagctacacctttgaggacgtgcctttccacagcagctacgctcacagccagagtttggaccggctgatgaatcctctgatcgaccagtatctgtattatctgaacaggacacaatcaaatagtggaactcttcagcagtctaggctactgtttagccaagctggacccaccagcatgtctcttcaagctaaaaactggctgcctggaccttgctacagacagcagcgtctgtcaaagcaggcaaacgacaacaacaacagcaactttccctggactgcggctacaaagtatcatctaaatggtcgggactcgttggttaatccaggaccagctatggccagccacaaagacgatgaagaaaagtttttccccatgcatggaaccctgatatttggtaaacaaggaacaaatgctaacgacgcggatttggaacatgtcatgattacagatgaagaagaaatcaggaccaccaatcccgtggctacagagcagtacggaaacgtgtcaaataatttgcaaaactcaaatactggtccaactacagaaaatgtcaatcaccagggagcgttacctggtatggtgtggcaggatcgagacgtgtacctgcagggacccatttgggccaagattcctcacaccgacggacactttcacccttctccactgatgggaggttttggactcaaacacccgcctcctcaaatcatgatcaaaaacactcctgttccagccaatcctcctacaaacttcagcgcggcaaagtttgcttccttcatcacacagtattccacgggacaggtcagcgtggagatcgagtgggggctgcagaaggagaacagcaaacgctggaaccccgagatccagtacacttccaactacaacaaatctgttaatgtggactttactgtggacactaatggtgtgtattcagagcctcgccccattggcaccagatacctgactcgtaatctgtaa

SEQ ID NO: 4410 - DNA, 2208 bp, Artificial Sequence
  source: /note="Description of Artificial Sequence: Synthetic polynucleotide"
atggctgccgatggttatcttccagattggctcgaggacactctctctgaaggaataagacagtggtggaagctcaaacctggcccaccaccaccaaagcccgcagagcggcatcaggacgacagcaggggtcttgtgcttcctgggtacaagtacctcggacccttcaacggactcgacaaaggagagccggtcaacgaggcagacgctgcggccctcgagcacgacaaggcctacgaccggcagctcgacagcggagacaacccgtacctcaagtacaaccacgccgacgcggagtttcaggagcgtcttaaagaagatacgtcttttgggggcaacctcggacgagcagtcttccaggcgaaaaagagggttcttgaacctctgggcctggttgaggaacctgttaagacggctccgggaaaaaagaggccggtagagcactctcctgcggagccagactcctcctcgggaaccggaaaagcgggccagcagcctgcaagaaagagattgaatttcggtcagactggagacgcagactccgtacctgacccccagcctctcggacagccaccagcagcccccacaagtttgggatctactacaatggctacaggcagtggcgcaccaatggcagacaataacgagggtgccgatggagtgggtaattcctcaggaaattggcattgcgattcccaatggctgggcgacagagtcatcaccaccagcacccgaacctgggccctgcccacctacaacaaccacctctacaagcaaatctccagccaatcaggagcatcgaacgacaaccactactttggctacagcaccccttgggggtattttgacttcaacagattccactgtcacttctccccacgtgactggcaaagactcatcaacaacaactggggattccgacccaagagactcaacttcaagctctttaacattcaagtcaaagaggtcacgcagaatgacggtacgacgacgattgccaataaccttaccagcacggttcaggtgtttactgactcggagtaccagctcccgtacgtcctcggctcggcgcatcaaggatgcctcccgccgtttccagcggacgtcttcatggtcccacagtatggatacctcaccctgaacaacgggagtcaggcggtaggacgctcttccttttactgcctggagtactttccttctcagatgctgcgtaccggaaacaactttaccttcagctacacctttgaggacgtgcctttccacagcagctacgctcacagccagagtttggaccggctgatgaatcctctgatcgaccagtatctgtattatctgaacaggacacgatcaaatagtggaactcttcagcagtctaggctactgtttagccaagctggacccaccagcatgtctcttcaagctaaaaactggctgcctggaccttgctacagacagcagcgtctgtcaaagcaggcaaacgacaacaacaacagcaactttccctggactgcggctacaaagtatcatctaaatggtcgggactcgttggttaatccaggaccagctatggccagccacaaagacgatgaagaaaagtttttccccatgcatggaaccctgatatttggtaaacaaggaacaaatgctaacgacgcggatttggaacatgtcatgattacagatgaagaagaaatcaggaccaccaatcccgtggctacagagcagtacggaaacgtgtcaaataatttgcaaaactcaaatactggtccaactacagaaaatgtcaatcaccagggagcgttacctggtatggtgtggcaggatcgagacgtgtacctgcagggacccatttgggccaagattcctcacaccgacggacactttcacccttctccactgatgggaggttttggactcaaacacccgcctcctcaaatcatgatcaaaaacactcctgttccagccaatcctcctacaaacttcagcgcggcaaagtttgcttccttcatcacacagtattccacgggacaggtcagcgtggagatcgagtgggagctgcagaaggagaacagcaaacgctggaaccccgagatccagtacacttccaactacaacaaatctgttaatgtggactttactgtggacactaatggtgtgtattcagagcctcgccccattggcaccagatacctgactcgtaatctgtaa

SEQ ID NO: 4411 - DNA, 2208 bp, Artificial Sequence
  source: /note="Description of Artificial Sequence: Synthetic polynucleotide"
atggctgccgatggttatcttccagattggctcgaggacactctctctgaaggaataagacagtggtggaagctcaaacctggcccaccaccaccaaagcccgcagagcggcatcaggacgacagcaggggtcttgtgcttcctgggtacaagtacctcggacccttcaacggactcgacaaaggagagccggtcaacgaggcagacgctgcggccctcgagcacgacaaggcctacgaccggcagctcgacagcggagacaacccgtacctcaagtacaaccacgccgacgcggagtttcaggagcgtcttaaagaagatacgtcttttgggggcaacctcggacgagcagtcttccaggcgaaaaagagggttcttgaacctctgggcctggttgaggaacctgttaagacggctccgggaaaaaagaggccggtagagcactctcctgcggagccagactcctcctcgggaaccggaaaagcgggccagcagcctgcaagaaagagattgaatttcggtcagactggagacgcagactccgtacctgacccccagcctctcggacagccaccagcagcccccacaagtttgggatctactacaatggctacaggcagtggcgcaccaatggcagacaataacgagggtgccgatggagtgggtaattcctcaggaaattggcattgcgattcccaatggctgggcgacagagtcatcaccaccagcacccgaacctgggccctgcccacctacaacaaccacctctacaagcaaatctccagccaatcaggagcatcgaacgacaaccactactttggctacagcaccccttgggggtattttgacttcaacagattccactgtcacttctccccacgtgactggcaaagactcatcaacaacaactggggattccgacccaagagactcaacttcaagctctttaacattcaagtcaaagaggtcacgcagaatgacggtacgacgacgattgccaataaccttaccagcacggttcaggtgtttactgactcggagtaccagctcccgtacgtcctcggctcggcgcatcaaggatgcctcccgccgtttccagcggacgtcttcatggtcccacagtatggatacctcaccctgaacaacgggagtcaggcggtaggacgctcttccttttactgcctggagtactttccttctcagatgctgcgtaccggaaacaactttaccttcagctacacctttgaggacgtgcctttccacagcagctacgctcacagccagagtttggaccggctgatgaatcctctgatcgaccagtatctgtattatctgaacaggacacaatcaaatagtggaactcttcagcagtctaggctactgtttagccaagctggacccaccagcatgtctcttcaagctaaaaactggctgcctggaccttgctacagacagcagcgtctgtcaaagcaggcaaacgacaacaacaacagcaactttccctggactgcggctacaaagtatcatctaaatggtcgggactcgttggttaatccaggaccagctatggccagccacaaagacgatgaagaaaagtttttccccatgcatggaaccctgatatttggtaaacaaggaacaaatgctaacgacgcggatttggaacatgtcatgattacagatgaagaagaaatcaggaccaccaatcccgtggctacagagcagtacggaaacgtgtcaaataatttgcaaaactcaaatactggtccaactacagaaaatgtcaatcaccagggagcgttacctggtatggtgtggcaggatcgaggcgtgtacctgcagggacccatttgggccaagattcctcacaccgacggacactttcacccttctccactgatgggaggttttggactcaaacacccgcctcctcaaatcatgatcaaaaacactcctgttccagccaatcctcctacaaacttcagcgcggcaaagtttgcttccttcatcacacagtattccacgggacaggtcagcgtggagatcgagtgggagctgcagaaggagaacagcaaacgctggaaccccgagatccagtacacttccaactacaacaaatctgttaatgtggactttactgtggacactaatggtgtgtattcagagcctcgccccattggcaccagatacctgactcgtaatctgtaa

SEQ ID NO: 4412 - DNA, 2208 bp, Artificial Sequence
  source: /note="Description of Artificial Sequence: Synthetic polynucleotide"
atggctgccgatggttatcttccagattggctcgaggacactctctctgaaggaataagacagtggtggaagctcaaacctggcccaccaccaccaaagcccgcagagcggcatcaggacgacagcaggggtcttgtgcttcctgggtacaagtacctcggacccttcaacggactcgacaaaggagagccggtcaacgaggcagacgctgcggccctcgagcacgacaaggcctacgaccggcagctcgacagcggagacaacccgtacctcaagtacaaccacgccgacgcggagtttcaggagcgtcttaaagaagatacgtcttttgggggcaacctcggacgagcagtcttccaggcgaaaaagagggttcttgaacctctgggcctggttgaggaacctgttaagacggctccgggaaaaaagaggccggtagagcactctcctgcggagccagactcctcctcgggaaccggaaaagcgggccagcagcctgcaagaaagagattgaatttcggtcagactggagacgcagactccgtacctgacccccagcctctcggacagccaccagcagcccccacaagtttgggatctactacaatggctacaggcagtggcgcaccaatggcagacaataacgagggtgccgatggagtgggtaattcctcaggaaattggcattgcgattcccaatggctgggcgacagagtcatcaccaccagcacccgaacctgggccctgcccacctacaacaaccacctctacaagcaaatctccagccaatcaggagcatcgaacgacaaccactactttggctacagcaccccttgggggtattttgacttcaacagattccactgtcacttctccccacgtgactggcaaagactcatcaacaacaactggggattccgacccaagagactcaacttcaagctctttaacattcaagtcaaagaggtcacgcagaatggcggtacgacgacgattgccaataaccttaccagcacggttcaggtgtttactgactcggagtaccagctcccgtacgtcctcggctcggcgcatcaaggatgcctcccgccgtttccagcggacgtcttcatggtcccacagtatggatacctcaccctgaacaacgggagtcaggcggtaggacgctcttccttttactgcctggagtactttccttctcagatgctgcgtaccggaaacaactttaccttcagctacacctttgaggacgtgcctttccacagcagctacgctcacagccagagtttggaccggctgatgaatcctctgatcgaccagtatctgtattatctgaacaggacacaatcaaatagtggaactcttcagcagtctaggctactgtttagccaagctggacccaccagcatgtctcttcaagctaaaaactggctgcctggaccttgctacagacagcagcgtctgtcaaagcaggcaaacgacaacaacaacagcaactttccctggactgcggctacaaagtatcatctaaatggtcgggactcgttggttaatccaggaccagctatggccagccacaaagacgatgaagaaaagtttttccccatgcatggaaccctgatatttggtaaacaaggaacaaatgctaacgacgcggatttggaacatgtcatgattacagatgaagaagaaatcaggaccaccaatcccgtggctacagagcagtacggaaacgtgtcaaataatttgcaaaactcaaatactggtccaactacagaaaatgtcaatcaccagggagcgttacctggtatggtgtggcaggatcgagacgtgtacctgcagggacccatttgggccaagattcctcacaccgacggacactttcacccttctccactgatgggaggttttggactcaaacacccgcctcctcaaatcatgatcaaaaacactcctgttccagccaatcctcctacaaacttcagcgcggcaaagtttgcttccttcatcacacagtattccacgggacaggtcagcgtggagatcgagtgggagctgcagaaggagaacagcaaacgctggaaccccgagatccagtacacttccaactacaacaaatctgttaatgtggactttactgtggacactaatggtgtgtattcagagcctcgccccattggcaccagatacctgactcgtaatctgtaa

SEQ ID NO: 4413 - DNA, 2208 bp, Artificial Sequence
  source: /note="Description of Artificial Sequence: Synthetic polynucleotide"
atggctgccgatggttatcttccagattggctcgaggacactctctctgaaggaataagacagtggtggaagctcaaacctggcccaccaccaccaaagcccgcagagcggcatcaggacgacagcaggggtcttgtgcttcctgggtacaagtacctcggacccttcaacggactcgacaaaggagagccggtcaacgaggcagacgctgcggccctcgagcacgacaaggcctacgaccggcagctcgacagcggagacaacccgtacctcaagtacaaccacgccgacgcggagtttcaggagcgtcttaaagaagatacgtcttttgggggcaacctcggacgagcagtcttccaggcgaaaaagagggttcttgaacctctgggcctggttgaggaacctgttaagacggctccgggaaaaaagaggccggtagagcactctcctgcggagccagactcctcctcgggaaccggaaaagcgggccagcagcctgcaagaaagagattgaatttcggtcagactggagacgcagactccgtacctgacccccagcctctcggacagccaccagcagcccccacaagtttgggatctactacaatggctacaggcagtggcgcaccaatggcagacaataacgagggtgccgatggagtgggtaattcctcaggaaattggcattgcgattcccaatggctgggcgacagagtcatcaccaccagcacccgaacctgggccctgcccacctacaacaaccacctctacaagcaaatctccagccaatcaggagcatcgaacgacaaccactactttggctacagcaccccttgggggtattttgacttcaacagattccactgtcacttctccccacgtgactggcaaagactcatcaacaacaactggggattccgacccaagagactcaacttcaagctctttaacattcaagtcaaagaggtcacgcagaatgacggtacgacgacgattgccaataaccttaccagcacggttcaggtgtttactgactcggagtaccagctcccgtacgtcctcggctcggcgcatcaaggatgcctcccgccgtttccagcggacgtcttcatggtcccacagtatggatacctcaccctgaacaacgggagtcaggcggtaggacgctcttccttttactgcctggagtactttccttctcagatgctgcgtaccggaaacaactttaccttcagctacacctttgaggacgtgcctttccacagcagctacgctcacagccagagtttggaccggctgatgaatcctctgatcgaccagtatctgtattatctgaacaggacacaatcaaatagtggaactcttcagcagtctaggctactgtttagccaagctggacccaccagcatgtctcttcaagctaaaaactggctgcctggaccttgctacagacagcagcgtctgtcaaagcaggcaaacgacaacaacaacagcaactttccctggactgcggctacaaagtatcatctaaatggtcgggactcgttggttaatccaggaccagctatggccagccacaaagacgatgaagaaaagtttttccccatgcatggaaccctgatatttggtaaacaaggaacaaatgctaacgacgcggatttggaacatgtcatgattacagatgaagaagaaatcaggaccaccaatcccgtggctacagagcagtacggaaacgtgtcaaataatttgcaaaactcaaatactggtccaactacagaaaatgtcaatcaccagggagcgttacctggtatggtgtggcaggatcgagacgtgtacctgcagggacccatttgggccaagattcctcacaccgacggacactttcacccttctccactgatgggaggttttggactcaaacacccgcctcctcaaatcatgatcaaaaacactcctgttccagccaatcctcctacaaacttcagcgcggcaaagtttgcttccttcatcacacagtattccacgggacaggtcagcgtggagatcgagtgggagctgcggaaggagaacagcaaacgctggaaccccgagatccagtacacttccaactacaacaaatctgttaatgtggactttactgtggacactaatggcgtgtattcagagcctcgccccattggcaccagatacctgactcgtaatctgtaa

SEQ ID NO: 4414 - DNA, 2208 bp, Artificial Sequence
  source: /note="Description of Artificial Sequence: Synthetic polynucleotide"
atggctgccgatggttatcttccagattggctcgaggacactctctctgaaggaataagacagtggtggaagctcaaacctggcccaccaccaccaaagcccgcagagcggcatcaggacgacagcaggggtcttgtgcttcctgggtacaagtacctcggacccttcaacggactcgacaaaggagagccggtcaacgaggcagacgctgcggccctcgagcacgacaaggcctacgaccggcagctcgacagcggagacaacccgtacctcaagtacaaccacgccgacgcggagtttcaggagcgtcttaaagaagatacgtcttttgggggcaacctcggacgagcagtcttccaggcgaaaaggagggttcttgaacctctgggcctggttgaggaacctgttaagacggctccgggaaaaaagaggccggtagagcactctcctgcggagccagactcctcctcgggaaccggaaaagcgggccagcagcctgcaagaaagagattgaatttcggtcagactggagacgcagactccgtacctgacccccagcctctcggacagccaccagcagcccccacaagtttgggatctactacaatggctacaggcagtggcgcaccaatggcagacaataacgagggtgccgatggagtgggtaattcctcaggaaattggcattgcgattcccaatggctgggcgacagagtcatcaccaccagcacccgaacctgggccctgcccacctacaacaaccacctctacaagcaaatctccagccaatcaggagcatcgaacgacaaccactactttggctacagcaccccttgggggtattttgacttcaacagattccactgtcacttctccccacgtgactggcaaagactcatcaacaacaactggggattccgacccaagagactcaacttcaagctctttaacattcaagtcaaagaggtcacgcagaatgacggtacgacgacgattgccaataaccttaccagcacggttcaggtgtttactgactcggagtaccagctcccgtacgtcctcggctcggcgcatcaaggatgcctcccgccgtttccagcggacgtcttcatggtcccacagtatggatacctcaccctgaacaacgggagtcaggcggtaggacgctcttccttttactgcctggagtactttccttctcagatgctgcgtaccggaaacaactttaccttcagctacacctttgaggacgtgcctttccacagcagctacgctcacagccagagtttggaccggctgatgaatcctctgatcgaccagtatctgtattatctgaacaggacacaatcaaatagtggaactcttcagcagtctaggctactgtttagccaagctggacccaccagcatgtctcttcaagctaaaaactggctgcctggaccttgctacagacagcagcgtctgtcaaagcaggcaaacgacaacaacaacagcaactttccctggactgcggctacaaagtatcatctaaatggtcgggactcgttggttaatccaggaccagctatggccagccacaaagacgatgaagaaaagtttttccccatgcatggaaccctgatatttggtaaacaaggaacaaatgctaacgacgcggatttggaacatgtcatgattacagatgaagaagaaatcaggaccaccaatcccgtggctacagagcagtacggaaacgtgtcaaataatttgcaaaactcaaatactggtccaactacagaaaatgtcaatcaccagggagcgttacctggtatggtgtggcaggatcgagacgtgtacctgcagggacccatttgggccaagattcctcacaccgacggacactttcacccttctccactgatgggaggttttggactcaaacacccgcctcctcaaatcatgatcaaaaacactcctgttccagccaatcctcctacaaacttcagcgcggcaaagtttgcttccttcatcacacagtattccacgggacaggtcagcgtggagatcgagtgggagctgcagaaggagaacagcaaacgctggaaccccgagatccagtacacttccaactacaacaaatctgttaatgtggactttactgtggacactaatggtgtgtattcagagcctcgccccattggcaccagatacctgactcgtaatctgtaa

SEQ ID NO: 4415 - DNA, 2208 bp, Artificial Sequence
  source: /note="Description of Artificial Sequence: Synthetic polynucleotide"
atggctgccgatggttatcttccagattggctcgaggacactctctctgaaggaataagacagtggtggaagctcaaacctggcccaccaccaccaaagcccgcagagcggcatcaggacgacagcaggggtcttgtgcttcctgggtacaagtacctcggacccttcaacggactcgacaaaggagagccggtcaacgaggcagacgctgcggccctcgagcacgacaaggcctacgaccggcagctcgacagcggagacaacccgtacctcaagtacaaccacgccgacgcggagcttcaggagcgtcttaaagaagatacgtcttttgggggcaacctcggacgagcagtcttccaggcgaaaaagagggttcttgaacctctgggcctggttgaggaacctgttaagacggctccgggaaaaaagaggccggtagagcactctcctgcggagccagactcctcctcgggaaccggaaaagcgggccagcagcctgcaagaaagagattgaatttcggtcagactggagacgcagactccgtacctgacccccagcctctcggacagccaccagcagcccccacaagtttgggatctactacaatggctacaggcagtggcgcaccaatggcagacaataacgagggtgccgatggagtgggtaattcctcaggaaattggcattgcgattcccaatggctgggcgacagagtcatcaccaccagcacccgaacctgggccctgcccacctacaacaaccacctctacaagcaaatctccagccaatcaggagcatcgaacgacaaccactactttggctacagcaccccttgggggtattttgacttcaacagattccactgtcacttctccccacgtgactggcaaagactcatcaacaacaactggggattccgacccaagagactcaacttcaagctctttaacattcaagtcaaagaggtcacgcagaatgacggtacgacgacgattgccaataaccttaccagcacggttcaggtgtttactgactcggagtaccagctcccgtacgtcctcggctcggcgcatcaaggatgcctcccgccgtttccagcggacgtcttcatggtcccacagtatggatacctcaccctgaacaacgggagtcaggcggtaggacgctcttccttttactgcctggagtactttccttctcagatgctgcgtaccggaaacaactttaccttcagctacacctttgaggacgtgcctttccacagcagctacgctcacagccagagtttggaccggctgatgaatcctctgatcgaccagtatctgtattatctgaacaggacacaatcaaatagtggaactcttcagcagtctaggctactgtttagccaagctggacccaccagcatgtctcttcaagctaaaaactggctgcctggaccttgctacagacagcagcgtctgtcaaagcaggcaaacgacaacaacaacagcaactttccctggactgcggctacaaagtatcatctaaatggtcgggactcgttggttaatccaggaccagctatggccagccacaaagacgatgaagaaaagtttttccccatgcatggaaccctgatatttggtaaacaaggaacaaatgctaacgacgcggatttggaacatgtcatgattacagatgaagaagaaatcaggaccaccaatcccgtggctacagagcagtacggaaacgtgtcaaataatttgcaaaactcaaatactggtccaactacagaaaatgtcaatcaccagggagcgttacctggtatggtgtggcaggatcgagacgtgtacctgcagggacccatttgggccaagattcctcacaccgacggacactttcacccttctccactgatgggaggttttggactcaaacacccgcctcctcaaatcatgatcaaaaacactcctgttccagccaatcctcctacaaacttcagcgcggcaaagtttgcttccttcatcacacagtattccacgggacaggtcagcgtggagatcgagtgggagctgcagaaggagaacagcaaacgctggaaccccgagatccagtacacttccaactacaacaaatctgttaatgtggactttactgtggacactaatggtgtgtattcagagcctcgccccattggcaccagatacctgactcgtaatctgtaa

SEQ ID NO: 4416 - DNA, 2208 bp, Artificial Sequence
  source: /note="Description of Artificial Sequence: Synthetic polynucleotide"
atggctgccgatggttatcttccagattggctcgaggacactctctctgaaggaataagacagtggtggaagctcaaacctggcccaccaccaccaaagcccgcagagcggcatcaggacgacagcaggggtcttgtgcttcctgggtacaagtacctcggacccttcaacggactcgacaaaggagagccggtcaacgaggcagacgctgcggccctcgagcacgacaaggcctacgaccggcagctcgacagcggagacaacccgtacctcaagtacaaccacgccgacgcggagtttcaggagcgtcttaaagaagatacgtcttttgggggcaacctcggacgagcagtcttccaggcgaaaaagagggttcttgaacctctgggcctggttgaggaacctgttaagacggctccgggaaaaaagaggccggtagagcactctcctgcggagccagactcctcctcgggaaccggaaaagcgggccagcagcctgcaagaaagagattgaatttcggtcagactggagacgcagactccgtacctgacccccagcctctcggacagccaccagcagcccccacaagtttgggatctactacaatggctacaggcagtggcgcaccaatggcagacaataacgagggtgccgatggagtgggtaattcctcaggaaattggcattgcgattcccaatggctgggcggcagagtcatcaccaccagcacccgaacctgggccctgcccacctacaacaaccacctctacaagcaaatctccagccaatcaggagcatcgaacgacaaccactactttggctacagcaccccttgggggtattttgacttcaacagattccactgtcacttctccccacgtgactggcaaagactcatcaacaacaactggggattccgacccaagagactcaacttcaagctctttaacattcaagtcaaagaggtcacgcagaatgacggtacgacgacgattgccaataaccttaccagcacggttcaggtgtttactgactcggagtaccagctcccgtacgtcctcggctcggcgcatcaaggatgcctcccgccgtttccagcggacgtcttcatggtcccacagtatggatacctcaccctgaacaacgggagtcaggcggtaggacgctcttccttttactgcctggagtactttccttctcagatgctgcgtaccggaaacaactttaccttcagctacacctttgaggacgtgcctttccacagcagctacgctcacagccagagtttggaccggctgatgaatcctctgatcgaccagtatctgtattatctgaacaggacacaatcaaatagtggaactcttcagcagtctaggctactgtttagccaagctggacccaccagcatgtctcttcaagctaaaaactggctgcctggaccttgctacagacagcagcgtctgtcaaagcaggcaaacgacaacaacaacagcaactttccctggactgcggctacaaagtatcatctaaatggtcgggactcgttggttaatccaggaccagctatggccagccacaaagacgatgaagaaaagtttttccccatgcatggaaccctgatatttggtaaacaaggaacaaatgctaacgacgcggatttggaacatgtcatgattacagatgaagaagaaatcaggaccaccaatcccgtggctacagagcagtacggaaacgtgtcaaataatttgcaaaactcaaatactggtccaactacagaaaatgtcaatcaccagggagcgttacctggtatggtgtggcaggatcgagacgtgtacctgcagggacccatttgggccaagattcctcacaccgacggacactttcacccttctccactgatgggaggttttggactcaaacacccgcctcctcaaatcatgatcaaaaacactcctgttccagccaatcctcctacaaacttcagcgcggcaaagtttgcttccttcatcacacagtattccacgggacaggtcagcgtggagatcgagtgggagctgcagaaggagaacagcaaacgctggaaccccgagatccagtacacttccaactacaacaaatctgttaatgtggactttactgtggacactaatggtgtgtattcagagcctcgccccattggcaccagatacctgactcgtaatctgtaa

SEQ ID NO: 4417 - DNA, 2208 bp, Artificial Sequence
  source: /note="Description of Artificial Sequence: Synthetic polynucleotide"
atggctgccgatggttatcttccagattggctcgaggacactctctctgaaggaataagacagtggtggaagctcaaacctggcccaccaccaccaaagcccgcagagcggcatcaggacgacagcaggggtcttgtgcttcctgggtacaagtacctcggacccttcaacggactcgacaaaggagagccggtcaacgaggcagacgctgcggccctcgagcacgacaaggcctacgaccggcagctcgacagcggagacaacccgtacctcaagtacaaccacgccgacgcggagtttcaggagcgtcttaaagaagatacgtcttttgggggcaacctcggacgagcagtcttccaggcgaaaaagagggttcttgaacctctgggcctggttgaggaacctgttaagacggctccgggaaaaaagaggccggtagagcactctcctgcggagccagactcctcctcgggaaccggaaaagcgggccagcagcctgcaagaaagagattgaatttcggtcagactggagacgcagactccgtacctgacccccagcctctcggacagccaccagcagcccccacaagtttgggatctactacaatggctacaggcagtggcgcaccaatggcagacaataacgagggtgccgatggagtgggtaattcctcaggaaattggcattgcgattcccaatggctgggcgacagagtcatcaccaccagcacccgaacctgggccctgcccacctacaacaaccacctctacaagcaaatctccagccaatcaggagcatcgaacgacaaccactactttggctacagcaccccttgggggtattttgacttcaacagattccactgtcacttctccccacgtgactggcaaagactcatcaacaacaactggggattccgacccaagagactcaacttcaagctctttaacattcaagtcaaagaggtcacgcagaatgacggtacgacgacgattgccaataaccttaccagcacggttcaggtgtttactgactcggagtaccagctcccgtacgtcctcggctcggcgcatcaaggatgcctcccgccgcttccagcggacgtcttcatggtcccacagtatggatacctcaccctgaacaacgggagtcaggcggtaggacgctcttccttttactgcctggagtactttccttctcagatgctgcgtaccggaaacaactttaccttcagctacacctttgaggacgtgcctttccacagcagctacgctcacagccagagtttggaccggctgatgaatcctctgatcgaccagtatctgtattatctgaacaggacacaatcaaatagtggaactcttcagcagtctaggctactgtttagccaagctggacccaccagcatgtctcttcaagctaaaaactggctgcctggaccttgctacagacagcagcgtctgtcaaagcaggcaaacgacaacaacaacagcaactttccctggactgcggctacaaagtatcatctaaatggtcgggactcgttggttaatccaggaccagctatggccagccacaaagacgatgaagaaaagtttttccccatgcatggaaccctgatatttggtaaacaaggaacaaatgctaacgacgcggatttggaacatgtcatgattacagatgaagaagaaatcaggaccaccaatcccgtggctacagagcagtacggaaacgtgtcaaataatttgcaaaactcaaatactggtccaactacagaaaatgtcaatcaccagggagcgttacctggtatggtgtggcaggatcgagacgtgtacctgcagggacccatttgggccaagattcctcacaccgacggacactttcacccttctccactgatgggaggttttggactcaaacacccgcctcctcaaatcatgatcaaaaacactcctgttccagccaatcctcctacaaacttcagcgcggcaaagtttgcttccttcatcacacagtattccacgggacaggtcagcgtggagatcgagtgggagctgcagaaggagaacagcaaacgctggaaccccgagatccagtacacttccaactacaacaaatctgttaatgtggactttactgtggacactaatggtgtgtattcagagcctcgccccattggcaccagatacctgactcgtaatctgtaa

SEQ ID NO: 4418 - DNA, 2208 bp, Artificial Sequence
  source: /note="Description of Artificial Sequence: Synthetic polynucleotide"
atggctgccgatggttatcttccagattggctcgaggacactctctctgaaggaataagacagtggtggaagctcaaacctggcccaccaccaccaaagcccgcagagcggcatcaggacgacagcaggggtcttgtgcttcctgggtacaagtacctcggacccttcaacggactcgacaaaggagagccggtcaacgaggcagacgctgcggccctcgagcacgacaaggcctacgaccggcagctcgacagcggagacaacccgtacctcaagtacaaccacgccgacgcggagtttcaggagcgtcttaaagaagatacgtcttttgggggcaacctcggacgagcagtcttccaggcgaaaaagagggttcttgaacctctgggcctggttgaggaacctgttaagacggctccgggaaaaaagaggccggtagagcactctcctgcggagccagactcctcctcgggaaccggaaaagcgggccagcagcctgcaagaaagagattgaatttcggtcagactggagacgcagactccgtacctgacccccagcctctcggacagccaccagcagcccccacaagtttgggatctactgcaatggctacaggcagtggcgcaccaatggcagacaataacgagggtgccgatggagtgggtaattcctcaggaaattggcattgcgattcccaatggctgggcgacagagtcatcaccaccagcacccgaacctgggccctgcccacctacaacaaccacctctacaagcaaatctccagccaatcaggagcatcgaacgacaaccactactttggctacagcaccccttgggggtattttgacttcaacagattccactgtcacttctccccacgtgactggcaaagactcatcaacaacaactggggattccgacccaagagactcaacttcaagctctttaacattcaagtcaaagaggtcacgcagaatgacggtacgacgacgattgccaataaccttaccagcacggttcaggtgtttactgactcggagtaccagctcccgtacgtcctcggctcggcgcatcaaggatgcctcccgccgtttccagcggacgtcttcatggtcccacagtatggatacctcaccctgaacaacgggagtcaggcggtaggacgctcttccttttactgcctggagtactttccttctcagatgctgcgtaccggaaacaactttaccttcagctacacctttgaggacgtgcctttccacagcagctacgctcacagccagagtttggaccggctgatgaatcctctgatcgaccagtatctgtattatctgaacaggacacaatcaaatagtggaactcttcagcagtctaggctactgtttagccaagctggacccaccagcatgtctcttcaagctaaaaactggctgcctggaccttgctacagacagcagcgtctgtcaaagcaggcaaacgacaacaacaacagcaactttccctggactgcggctacaaagtatcatctaaatggtcgggactcgttggttaatccaggaccagctatggccagccacaaagacgatgaagaaaagtttttccccatgcatggaaccctgatatttggtaaacaaggaacaaatgctaacgacgcggatttggaacatgtcatgattacagatgaagaagaaatcaggaccaccaatcccgtggctacagagcagtacggaaacgtgtcaaataatttgcaaaactcaaatactggtccaactacagaaaatgtcaatcaccagggagcgttacctggtatggtgtggcaggatcgagacgtgtacctgcagggacccatttgggccaagattcctcacaccgacggacactttcacccttctccactgatgggaggttttggactcaaacacccgcctcctcaaatcatgatcaaaaacactcctgttccagccaatcctcctacaaacttcagcgcggcaaagtttgcttccttcatcacacagtattccacgggacaggtcagcgtggagatcgagtgggagctgcagaaggagaacagcaaacgctggaaccccgagatccagtacacttccaactacaacaaatctgttaatgtggactttactgtggacactaatggtgtgtattcagagcctcgccccattggcaccagatacctgactcgtaatctgtaa

SEQ ID NO: 4419 - DNA, 2208 bp, Artificial Sequence
  source: /note="Description of Artificial Sequence: Synthetic polynucleotide"
atggctgccgatggttatcttccagattggctcgaggacactctctctgaaggaataagacagtggtggaagctcaaacctggcccaccaccaccaaagcccgcagagcggcatcaggacgacagcaggggtcttgtgcttcctgggtacaagtacctcggacccttcaacggactcgacaaaggagagccggtcaacgaggcagacgctgcggccctcgagcacgacaaggcctacgaccggcagctcgacagcggagacaacccgtacctcaagtacaaccacgccgacgcggagtttcaggagcgtcttaaagaagatacgtcttttgggggcaacctcggacgagcagtcttccaggcgaaaaagagggttcttgaacctctgggcctggttgaggaacctgttaagacggctccgggaaaaaagaggccggtagagcactctcctgcggagccagactcctcctcgggaaccggaaaagcgggccagcagcctgcaagaaagagattgaatttcggtcagactggagacgcagactccgtacctgacccccagcctctcggacagccaccagcagcccccacaagtttgggatctactacaatggctacaggcagtggcgcaccaatggcagacaataacgagggtgccgatggagtgggtaattcctcaggaaattggcattgcgattcccaatggctgggcgacagagtcatcaccaccagcacccgaacctgggccctgcccacctacaacaaccacctctacaagcaaatctccagccaatcaggagcatcgaacgacaaccactactttggctacagcaccccttgggggtattttgacttcaacagattccactgtcacttctccccacgtgactggcaaagactcatcaacaacaactggggattccgacccaagagactcaacttcaagctctttaacattcaagtcaaagaggtcacgcagaatgacggtacgacgacgattgccaataaccttaccagcacggttcaggtgtttactgactcggagtaccagctcccgtacgtcctcggctcggcgcatcaaggatgcctcccgccgtttccagcggacgtcttcatggtcccacagtatggatacctcaccctgaacaacgggagtcaggcggtaggacgctcttccttttactgcctggagtactttccttctcagatgctgcgtaccggaaacaactttaccttcagctacacctttgaggacgtgcctttccacagcagctacgctcacagccagagtttggaccggctgatgaatcctctgatcgaccagtatctgtattatctgaacaggacacaatcaaatagtggaactcttcagcagtctaggctactgtttagccaagctggacccaccagcatgtctcttcaagctaaaaactggctgcctggaccttgctacagacagcagcgtctgtcaaggcaggcaaacgacaacaacaacagcaactttccctggactgcggctacaaagtatcatctaaatggtcgggactcgttggttaatccaggaccagctatggccagccacaaagacgatgaagaaaagtttttccccatgcatggaaccctgatatttggtaaacaaggaacaaatgctaacgacgcggatttggaacatgtcatgattacagatgaagaagaaatcaggaccaccaatcccgtggctacagagcagtacggaaacgtgtcaaataatttgcaaaactcaaatactggtccaactacagaaaatgtcaatcaccagggagcgttacctggtatggtgtggcaggatcgagacgtgtacctgcagggacccatttgggccaagattcctcacaccgacggacactttcacccttctccactgatgggaggttttggactcaaacacccgcctcctcaaatcatgatcaaaaacactcctgttccagccaatcctcctacaaacttcagcgcggcaaagtttgcttccttcatcacacagtattccacgggacaggtcagcgtggagatcgagtgggagctgcagaaggagaacagcaaacgctggaaccccgagatccagtacacttccaactacaacaaatctgttaatgtggactttactgtggacactaatggtgtgtattcagagcctcgccccattggcaccagatacctgactcgtaatctgtaa

SEQ ID NO: 4420 - DNA, 2208 bp, Artificial Sequence
  source: /note="Description of Artificial Sequence: Synthetic polynucleotide"
atggctgccgatggttatcttccagattggctcgaggacactctctctgaaggaataagacagtggtggaagctcaaacctggcccaccaccaccaaagcccgcagagcggcatcaggacgacagcaggggtcttgtgcttcctgggtacaagtacctcggacccttcaacggactcgacaaaggagagccggtcaacgaggcagacgctgcggccctcgagcacgacaaggcctacgaccggcagctcggcagcggagacaacccgtacctcaagtacaaccacgccgacgcggagtttcaggagcgtcttaaagaagatacgtcttttgggggcaacctcggacgagcagtcttccaggcgaaaaagagggttcttgaacctctgggcctggttgaggaacctgttaagacggctccgggaaaaaagaggccggtagagcactctcctgcggagccagactcctcctcgggaaccggaaaagcgggccagcagcctgcaagaaagagattgaatttcggtcagactggagacgcagactccgtacctgacccccagcctctcggacagccaccagcagcccccacaagtttgggatctactacaatggctacaggcagtggcgcaccaatggcagacaataacgagggtgccgatggagtgggtaattcctcaggaaattggcattgcgattcccaatggctgggcgacagagtcatcaccaccagcacccgaacctgggccctgcccacctacaacaaccacctctacaagcaaatctccagccaatcaggagcatcgaacgacaaccactactttggctacagcaccccttgggggtattttgacttcaacagattccactgtcacttctccccacgtgactggcaaagactcatcaacaacaactggggattccgacccaagagactcaacttcaagctctttaacattcaagtcaaagaggtcacgcagaatgacggtacgacgacgattgccaataaccttaccagcacggttcaggtgtttactgactcggagtaccagctcccgtacgtcctcggctcggcgcatcaaggatgcctcccgccgtttccagcggacgtcttcatggtcccacagtatggatacctcaccctgaacaacgggagtcaggcggtaggacgctcttccttttactgcctggagtactttccttctcagatgctgcgtaccggaaacaactttaccttcagctacacctttgaggacgtgcctttccacagcagctacgctcacagccagagtttggaccggctgatgaatcctctgatcgaccagtatctgtattatctgaacaggacacaatcaaatagtggaactcttcagcagtctaggctactgtttagccaagctggacccaccagcatgtctcttcaagctaaaaactggctgcctggaccttgctacagacagcagcgtctgtcaaagcaggcaaacgacaacaacaacagcaactttccctggactgcggctacaaagtatcatctaaatggtcgggactcgttggttaatccaggaccagctatggccagccacaaagacgatgaagaaaagtttttccccatgcatggaaccctgatatttggtaaacaaggaacaaatgctaacgacgcggatttggaacatgtcatgattacagatgaagaagaaatcaggaccaccaatcccgtggctacagagcagtacggaaacgtgtcaaataatttgcaaaactcaaatactggtccaactacagaaaatgtcaatcaccagggagcgttacctggtatggtgtggcaggatcgagacgtgtacctgcagggacccatttgggccaagattcctcacaccgacggacactttcacccttctccactgatgggaggttttggactcaaacacccgcctcctcaaatcatgatcaaaaacactcctgttccagccaatcctcctacaaacttcagcgcggcaaagtttgcttccttcatcacacagtattccacgggacaggtcagcgtggagatcgagtgggagctgcagaaggagaacagcaaacgctggaaccccgagatccagtacacttccaactacaacaaatctgttaatgtggactttactgtggacactaatggtgtgtattcagagcctcgccccattggcaccagatacctgactcgtaatctgtaa

SEQ ID NO: 4421 - DNA, 2208 bp, Artificial Sequence
  source: /note="Description of Artificial Sequence: Synthetic polynucleotide"
atggctgccgatggttatcttccagattggctcgaggacactctctctgaaggaataagacagtggtggaagctcaaacctggcccaccaccaccaaagcccgcagagcggcatcaggacgacagcaggggtcttgtgcttcctgggtacaagtacctcggacccttcaacggactcgacaaaggagagccggtcaacgaggcagacgctgcggccctcgagcacgacaaggcctacgaccggcagctcgacagcggagacaacccgtacctcaagtacaaccacgccgacgcggagtttcaggagcgtcttaaagaagatacgtcttttgggggcaacctcggacgagcagtcttccaggcgaaaaagagggttcttgaacctctgggcctggttgaggaacctgttaagacggctccgggaaaaaagaggccggtagagcactctcctgcggagccagactcctcctcgggaaccggaaaagcgggccagcagcctgcaagaaagagattgaatttcggtcagactggagacgcagactccgtacctgacccccagcctctcggacagccaccagcagcccccacaagtttgggatctactacaatggctacaggcagtggcgcaccaatggcagacaataacgagggtgccgatggagtgggtaattcctcaggaaattggcattgcgattcccaatggctgggcgacagagtcatcaccaccagcacccgaacctgggccctgcccacctacaacaaccacctctacaagcaaatctccagccaatcaggagcatcgaacgacaaccactactttggctacagcaccccttgggggtattttgacttcaacagattccactgtcacttctccccacgtgactggcaaagactcatcaacaacaactggggattccgacccaagagactcaacttcaagctctttaacattcaagtcaaagaggtcacgcagaatgacggtacgacgacgattgccaataaccttaccagcacggttcaggtgtttactgactcggagtaccagctcccgtacgtcctcggctcggcgcatcaaggatgcctcccgccgtttccagcggacgtcttcatggtcccacagtatggatacctcaccctgaacaacgggagtcaggcggtaggacgctcttccttttactgcctggagtactttccttctcagatgctgcgtaccggaaacaactttaccttcagctacacctttgaggacgtgcctttccacagcagctacgctcacagccagagtttggaccggctgatgaatcctctgatcgaccagtatctgcattatctgaacaggacacaatcaaatagtggaactcttcagcagtctaggctactgtttagccaagctggacccaccagcatgtctcttcaagctaaaaactggctgcctggaccttgctacagacagcagcgtctgtcaaagcaggcaaacgacaacaacaacagcaactttccctggactgcggctacaaagtatcatctaaatggtcgggactcgttggttaatccaggaccagctatggccagccacaaagacgatgaagaaaagtttttccccatgcatggaaccctgatatttggtaaacaaggaacaaatgctaacgacgcggatttggaacatgtcatgattacagatgaagaagaaatcaggaccaccaatcccgtggctacagagcagtacggaaacgtgtcaaataatttgcaaaactcaaatactggtccaactacagaaaatgtcaatcaccagggagcgttacctggtatggtgtggcaggatcgagacgtgtacctgcagggacccatttgggccaagattcctcacaccgacggacactttcacccttctccactgatgggaggttttggactcaaacacccgcctcctcaaatcatgatcaaaaacactcctgttccagccaatcctcctacaaacttcagcgcggcaaagtttgcttccttcatcacacagtattccacgggacaggtcagcgtggagatcgagtgggagctgcagaaggagaacagcaaacgctggaaccccgagatccagtacacttccaactacaacaaatctgttaatgtggactttactgtggacactaatggtgtgtattcagagcctcgccccattggcaccagatacctgactcgtaatctgtaa

SEQ ID NO: 4422 - DNA, 2208 bp, Artificial Sequence
  source: /note="Description of Artificial Sequence: Synthetic polynucleotide"
atggctgccgatggttatcttccagattggctcgaggacactctctctgaaggaataagacagtggtggaagctcaaacctggcccaccaccaccaaagcccgcagagcggcatcaggacgacagcaggggtcttgtgcttcctgggtacaagtacctcggacccttcaacggactcgacaaaggagagccggtcaacgaggcagacgctgcggccctcgagcacgacaaggcctacgaccggcagctcgacagcggagacaacccgtacctcaagtacaaccacgccgacgcggagtttcaggagcgtcttaaagaagatacgtcttttgggggcaacctcggacgagcagtcttccaggcgaaaaagagggttcttgaacctctgggcctggttgaggaacctgttaagacggctccgggaaaaaagaggccggtagagcaccctcctgcggagccagactcctcctcgggaaccggaaaagcgggccagcagcctgcaagaaagagattgaatttcggtcagactggagacgcagactccgtacctgacccccagcctctcggacagccaccagcagcccccacaagtttgggatctactacaatggctacaggcagtggcgcaccaatggcagacaataacgagggtgccgatggagtgggtaattcctcaggaaattggcattgcgattcccaatggctgggcgacagagtcatcaccaccagcacccgaacctgggccctgcccacctacaacaaccacctctacaagcaaatctccagccaatcaggagcatcgaacgacaaccactactttggctacagcaccccttgggggtattttgacttcaacagattccactgtcacttctccccacgtgactggcaaagactcatcaacaacaactggggattccgacccaagagactcaacttcaagctctttaacattcaagtcaaagaggtcacgcagaatgacggtacgacgacgattgccaataaccttaccagcacggttcaggtgtttactgactcggagtaccagctcccgtacgtcctcggctcggcgcatcaaggatgcctcccgccgtttccagcggacgtcttcatggtcccacagtatggatacctcaccctgaacaacgggagtcaggcggtaggacgctcttccttttactgcctggagtactttccttctcagatgctgcgtaccggaaacaactttaccttcagctacacctttgaggacgtgcctttccacagcagctacgctcacagccagagtttggaccggctgatgaatcctctgatcgaccagtatctgtattatctgaacaggacacaatcaaatagtggaactcttcagcagtctaggctactgtttagccaagctggacccaccagcatgtctcttcaagctaaaaactggctgcctggaccttgctacagacagcagcgtctgtcaaagcaggcaaacgacaacaacaacagcaactttccctggactgcggctacaaagtatcatctaaatggtcgggactcgttggttaatccaggaccagctatggccagccacaaagacgatgaagaaaagtttttccccatgcatggaaccctgatatttggtaaacaaggaacaaatgctaacgacgcggatttggaacatgtcatgattacagatgaagaagaaatcaggaccaccaatcccgtggctacagagcagtacggaaacgtgtcaaataatttgcaaaactcaaatactggtccaactacagaaaatgtcaatcaccagggagcgttacctggtatggtgtggcaggatcgagacgtgtacctgcagggacccatttgggccaagattcctcacaccgacggacactttcacccttctccactgatgggaggttttggactcaaacacccgcctcctcaaatcatgatcaaaaacactcctgttccagccaatcctcctacaaacttcagcgcggcaaagtttgcttccttcatcacacagtattccacgggacaggtcagcgtggagatcgagtgggagctgcagaaggagaacagcaaacgctggaaccccgagatccagtacacttccaactacaacaaatctgttaatgtggactttactgtggacactaatggtgtgtattcagagcctcgccccattggcaccagatacctgactcgtaatctgtaa

SEQ ID NO: 4423 - DNA, 2208 bp, Artificial Sequence
  source: /note="Description of Artificial Sequence: Synthetic polynucleotide"
atggctgccgatggttatcttccagattggctcgaggacactctctctgaaggaataagacagtggtggaagctcaaacctggcccaccaccaccaaagcccgcagagcggcatcaggacgacagcaggggtcttgtgcttcctgggtacaagtacctcggacccttcaacggactcgacaaaggagagccggtcaacgaggcagacgctgcggccctcgagcacgacaaggcctacgaccggcagctcgacagcggagacaacccgtacctcaagtacaaccacgccgacgcggagtttcaggagcgtcttaaagaagatacgtcttttgggggcaacctcggacgagcagtcttccaggcgaaaaagagggttcttgaacctctgggcctggttgaggaacctgttaagacggctccgggaaaaaagaggccggtagagcactctcctgcggagccagactcctcctcgggaaccggaaaagcgggccagcagcctgcaagaaagagattgaatttcggtcagactggagacgcagactccgtacctgacccccagcctctcggacagccaccagcagcccccacaagtttgggatctactacaatggctacaggcagtggcgcaccaatggcagacaataacgagggtgccgatggagtgggtaattcctcaggaaattggcattgcgattcccaatggctgggcgacagagtcatcaccaccagcacccgaacctgggccctgcccacctacaacaaccacctctacaagcaaatctccagccaatcaggagcatcgaacgacaaccactactttggctacagcaccccttgggggtattttgacttcaacagattccactgtcacttctccccacgtgactggcaaagactcatcaacaacaactggggattccgacccaagagactcaacttcaagctctttaacattcaagtcaaagaggtcacgcagaatgacggtacgacgacgattgccaataaccttaccagcacggttcaggtgtttactgactcggagtaccagctcccgtacgtcctcggctcggcgcatcaaggatgcctcccgccgtttccagcggacgtcttcatggtcccacagtatggatacctcaccctgaacaacgggagtcaggcggtaggacgctcttccttttactgcctggagtactttccttctcagatgctgcgtaccggaaacaactttaccttcagctacacctttgaggacgtgcctttccacagcagctacgctcacagccagagtttggaccggctgatgaatcctctgatcgaccagtatctgtattatctgaacaggacacaatcaaatagtggaactcttcagcagtctaggctactgtttagccaagctggacccaccagcatgtctcttcaagctaaaaactggctgcctggaccttgctacagacagcagcgtctgtcaaagcaggcaaacgacaacaacaacagcaactttccctggactgcggctacaaagtatcatctaaatggtcgggactcgttggttaatccaggaccagctatggccagccacaaagacgatgaagaaaagtttttccccatgcatggaaccctgatatttggtaaacaaggaacaaatgctaacgacgcggatttggaacatgtcatgattacagatgaagaagaaatcaggaccaccaatcccgtggctacagagcagtacggaaacgtgtcaaataatttgcaaaactcaaatactggtccaactacagaaaatgtcaatcaccagggagcgttacctggtatggtgtggcaggatcgagacgtgtacctgcagggacccatttgggccaagattcctcacaccgacggacactttcacccttctccactgatgggaggttttggactcaaacacccgcctcctcaaatcatgatcaaaaacactcctgttccagccaatcctcctacaaacttcagcgcggcaaagtttgcttccttcatcacacagtattccacgggacaggtcagcgtggagatcgagtgggagctgcagaaggagaacagcaaacgctggaaccccgagatccagtacacttccaactacaacaaatctgttaatgtggactttactgcggacactaatggtgtgtattcagagcctcgccccattggcaccagatacctgactcgtaatctgtaa

SEQ ID NO: 4424 - DNA, 2208 bp, Artificial Sequence
  source: /note="Description of Artificial Sequence: Synthetic polynucleotide"
atggctgccgatggttatcttccagattggctcgaggacactctctctgaaggaataagacagtggtggaagctcaaacctggcccaccaccaccaaagcccgcagagcggcatcaggacgacagcaggggtcttgtgcttcctgggtacaagtacctcggacccttcaacggactcgacaaaggagagccggtcaacgaggcagacgctgcggccctcgagcacgacaaggcctacgaccggcagctcgacagcggagacaacccgtacctcaagtacaaccacgccgacgcggagtttcaggagcgtcttaaagaagatacgtcttttgggggcaacctcggacgagcagtcttccaggcgaaaaagagggttcttgaacctctgggcctggttgaggaacctgttaagacggctccgggaaaaaagaggccggtagagcactctcctgcggagccagactcctcctcgggaaccggaaaagcgggccagcagcctgcaagaaagagattgaatttcggtcagactggagacgcagactccgtacctgacccccagcctctcggacagccaccagcagcccccacaagtttgggatctactacaatggctacaggcagtggcgcaccaatggcagacaataacgagggtgccgatggagtgggtaattcctcaggaaattggcattgcgattcccaatggctgggcgacagagtcatcaccaccagcacccgaacctgggccctgcccacctacaacaaccacctctacaagcaaatctccagccaatcaggagcatcgaacgacaaccactactttggctacagcaccccttgggggtattttgacttcaacagattccactgtcacttctccccacgtgactggcaaagactcatcaacaacaactggggattccgacccaagagactcaacttcaagctctttaacattcaagtcaaagaggtcacgcagaatgacggtacgacgacgattgccaataaccttaccagcacggttcaggtgtttactgactcggagtaccagctcccgtacgtcctcggctcggcgcatcaaggatgcctcccgccgtttccagcggacgtcttcatggtcccacagtatggatacctcaccctgaacaacgggagtcaggcggtaggacgctcttccttttactgcctggagtactttccttctcagatgctgcgtaccggaaacaactttaccttcagctacacctttgaggacgtgcctttccacagcagctacgctcacagccagagtttggaccggctgatgaatcctctgatcgaccagtatctgtattatctgaacaggacacaatcaaatagtggaactcttcggcagtctaggctactgtttagccaagctggacccaccagcatgtctcttcaagctaaaaactggctgcctggaccttgctacagacagcagcgtctgtcaaagcaggcaaacgacaacaacaacagcaactttccctggactgcggctacaaagtatcatctaaatggtcgggactcgttggttaatccaggaccagctatggccagccacaaagacgatgaagaaaagtttttccccatgcatggaaccctgatatttggtaaacaaggaacaaatgctaacgacgcggatttggaacatgtcatgattacagatgaagaagaaatcaggaccaccaatcccgtggctacagagcagtacggaaacgtgtcaaataatttgcaaaactcaaatactggtccaactacagaaaatgtcaatcaccagggagcgttacctggtatggtgtggcaggatcgagacgtgtacctgcagggacccatttgggccaagattcctcacaccgacggacactttcacccttctccactgatgggaggttttggactcaaacacccgcctcctcaaatcatgatcaaaaacactcctgttccagccaatcctcctacaaacttcagcgcggcaaagtttgcttccttcatcacacagtattccacgggacaggtcagcgtggagatcgagtgggagctgcagaaggagaacagcaaacgctggaaccccgagatccagtacacttccaactacaacaaatctgttaatgtggactttactgtggacactaatggtgtgtattcagagcctcgccccattggcaccagatacctgactcgtaatctgtaa

SEQ ID NO: 4425 - DNA, 2208 bp, Artificial Sequence
  source: /note="Description of Artificial Sequence: Synthetic polynucleotide"
atggctgccgatggttatcttccagattggctcgaggacactctctctgaaggaataagacagtggtggaagctcaaacctggcccaccaccaccaaagcccgcagagcggcatcaggacgacagcaggggtcttgtgcttcctgggtacaagtacctcggacccttcaacggactcgacaaaggagagccggtcaacgaggcagacgctgcggccctcgagcacgacaaggcctacgaccggcagctcgacagcggagacaacccgtacctcaagtacaaccacgccgacgcggagtttcaggagcgtcttaaagaagatacgtcttttgggggcaacctcggacgagcagtcttccaggcgaaaaagagggttcttgaacctctgggcctggttgaggaacctgttaagacggctccgggaaaaaagaggccggtagagcactctcctgcggagccagactcctcctcgggaaccggaaaagcgggccagcagcctgcaagaaagagattgaatttcggtcagactggagacgcagactccgtacctgacccccagcctctcggacagccaccagcagcccccacaagtttgggatctactacaatggctacaggcagtggcgcaccaatggcagacaataacgagggtgccgatggagtgggtaattcctcaggaaattggcattgcgattcccaatggctgggcgacagagtcatcaccaccagcacccgaacctgggccctgcccacctacaacaaccacctctacaagcaaatctccagccaatcaggagcatcgaacgacaaccactactttggctacagcaccccttgggggtattttgacttcaacagattccactgtcacttctccccacgtgactggcaaagactcatcaacaacaactggggattccgacccaagagactcaacttcaagctctttaacattcaagtcaaagaggtcacgcagaatgacggtacgacgacgattgccaataaccttaccagcacggttcaggtgtttactgactcggagtaccagctcccgtacgtcctcggctcggcgcatcaaggatgcctcccgccgtttccagcggacgtcttcatggtcccacagtatggatacctcaccctgaacaacgggagtcaggcggtaggacgctcttccttttactgcctggagtactttccttctcagatgctgcgtaccggaaacaactttaccttcagctacacctttgaggacgtgcctttccacagcagctacgctcacagccagagtttggaccggctgatgaatcctctgatcgaccagtatctgtattatctgaacaggacacaatcaaatagtggaactcttcagcagtctaggctactgtttagccaagctggacccaccagcatgtctcttcaagctaaaaactggctgcctggaccttgctacagacagcagcgtctgtcaaagcaggcaaacgacaacaacaacagcaactttccctggactgcggctacaaagtatcatctaaatggtcgggactcgttggttaatccaggaccagctatggccagccacaaagacgatgaagaaaagtttttccccatgcatggaaccctgatatttggtaaacaaggaacaaatgctaacgacgcggatttggaacatgtcatgattacagatgaagaagaaatcaggaccaccaatcccgtggctacagagcagtacggaaacgtgtcaaataatttgcaaaactcaaatactggtccaactacagaaaatgtcaatcaccagggagcgttacctggtatggtgtggcaggatcgagacgtgtacctgcagggacccatttgggccaagattcctcacaccgacggacactttcacccttctccactgatgggaggttttggactcaaacacccgcctcctcaaatcatgatcaaaaacactcctgttccagccaatcctcctacaaacttcagcgcggcaaagtttgcttccttcatcacacagtattccacgggacgggtcagcgtggagatcgagtgggagctgcagaaggagaacagcaaacgctggaaccccgagatccagtacacttccaactacaacaaatctgttaatgtggactttactgtggacactaatggtgtgtattcagagcctcgccccattggcaccagatacctgactcgtaatctgtaa

SEQ ID NO: 4426 - DNA, 2208 bp, Artificial Sequence
  source: /note="Description of Artificial Sequence: Synthetic polynucleotide"
atggctgccgatggttatcttccagattggctcgaggacactctctctgaaggaataagacagtggtggaagctcaaacctggcccaccaccaccaaagcccgcagagcggcatcaggacgacagcaggggtcttgtgcttcctgggtacaagtacctcggacccttcaacggactcgacaaaggagagccggtcaacgaggcagacgctgcggccctcgagcacgacaaggcctacgaccggcagctcgacagcggagacaacccgtacctcaagtacaaccacgccgacgcggagtttcaggagcgtcttaaagaagatacgtcttttgggggcaacctcggacgagcagtcttccgggcgaaaaagagggttcttgaacctctgggcctggttgaggaacctgttaagacggctccgggaaaaaagaggccggtagagcactctcctgcggagccagactcctcctcgggaaccggaaaagcgggccagcagcctgcaagaaagagattgaatttcggtcagactggagacgcagactccgtacctgacccccagcctctcggacagccaccagcagcccccacaagtttgggatctactacaatggctacaggcagtggcgcaccaatggcagacaataacgagggtgccgatggagtgggtaattcctcaggaaattggcattgcgattcccaatggctgggcgacagagtcatcaccaccagcacccgaacctgggccctgcccacctacaacaaccacctctacaagcaaatctccagccaatcaggagcatcgaacgacaaccactactttggctacagcaccccttgggggtattttgacttcaacagattccactgtcacttctccccacgtgactggcaaagactcatcaacaacaactggggattccgacccaagagactcaacttcaagctctttaacattcaagtcaaagaggtcacgcagaatgacggtacgacgacgattgccaataaccttaccagcacggttcaggtgtttactgactcggagtaccagctcccgtacgtcctcggctcggcgcatcaaggatgcctcccgccgtttccagcggacgtcttcatggtcccacagtatggatacctcaccctgaacaacgggagtcaggcggtaggacgctcttccttttactgcctggagtactttccttctcagatgctgcgtaccggaaacaactttaccttcagctacacctttgaggacgtgcctttccacagcagctacgctcacagccagagtttggaccggctgatgaatcctctgatcgaccagtatctgtattatctgaacaggacacaatcaaatagtggaactcttcagcagtctaggctactgtttagccaagctggacccaccagcatgtctcttcaagctaaaaactggctgcctggaccttgctacagacagcagcgtctgtcaaagcaggcaaacgacaacaacaacagcaactttccctggactgcggctacaaagtatcatctaaatggtcgggactcgttggttaatccaggaccagctatggccagccacaaagacgatgaagaaaagtttttccccatgcatggaaccctgatatttggtaaacaaggaacaaatgctaacgacgcggatttggaacatgtcatgattacagatgaagaagaaatcaggaccaccaatcccgtggctacagagcagtacggaaacgtgtcaaataatttgcaaaactcaaatactggtccaactacagaaaatgtcaatcaccagggagcgttacctggtatggtgtggcaggatcgagacgtgtacctgcagggacccatttgggccaagattcctcacaccgacggacactttcacccttctccactgatgggaggttttggactcaaacacccgcctcctcaaatcatgatcaaaaacactcctgttccagccaatcctcctacaaacttcagcgcggcaaagtttgcttccttcatcacacagtattccacgggacaggtcagcgtggagatcgagtgggagctgcagaaggagaacagcaaacgctggaaccccgagatccagtacacttccaactacaacaaatctgttaatgtggactttactgtggacactaatggtgtgtattcagagcctcgccccattggcaccagatacctgactcgtaatctgtaa

SEQ ID NO: 4427 - DNA, 2208 bp, Artificial Sequence
  source: /note="Description of Artificial Sequence: Synthetic polynucleotide"
atggctgccgatggttatcttccagattggctcgaggacactctctctgaaggaataagacagtggtggaagcccaaacctggcccaccaccaccaaagcccgcagagcggcatcaggacgacagcaggggtcttgtgcttcctgggtacaagtacctcggacccttcaacggactcgacaaaggagagccggtcaacgaggcagacgctgcggccctcgagcacgacaaggcctacgaccggcagctcgacagcggagacaacccgtacctcaagtacaaccacgccgacgcggagtttcaggagcgtcttaaagaagatacgtcttttgggggcaacctcggacgagcagtcttccaggcgaaaaagagggttcttgaacctctgggcctggttgaggaacctgttaagacggctccgggaaaaaagaggccggtagagcactctcctgcggagccagactcctcctcgggaaccggaaaagcgggccagcagcctgcaagaaagagattgaatttcggtcagactggagacgcagactccgtacctgacccccagcctctcggacagccaccagcagcccccacaagtttgggatctactacaatggctacaggcagtggcgcaccaatggcagacaataacgagggtgccgatggagtgggtaattcctcaggaaattggcattgcgattcccaatggctgggcgacagagtcatcaccaccagcacccgaacctgggccctgcccacctacaacaaccacctctacaagcaaatctccagccaatcaggagcatcgaacgacaaccactactttggctacagcaccccttgggggtattttgacttcaacagattccactgtcacttctccccacgtgactggcaaagactcatcaacaacaactggggattccgacccaagagactcaacttcaagctctttaacattcaagtcaaagaggtcacgcagaatgacggtacgacgacgattgccaataaccttaccagcacggttcaggtgtttactgactcggagtaccagctcccgtacgtcctcggctcggcgcatcaaggatgcctcccgccgtttccagcggacgtcttcatggtcccacagtatggatacctcaccctgaacaacgggagtcaggcggtaggacgctcttccttttactgcctggagtactttccttctcagatgctgcgtaccggaaacaactttaccttcagctacacctttgaggacgtgcctttccacagcagctacgctcacagccagagtttggaccggctgatgaatcctctgatcgaccagtatctgtattatctgaacaggacacaatcaaatagtggaactcttcagcagtctaggctactgtttagccaagctggacccaccagcatgtctcttcaagctaaaaactggctgcctggaccttgctacagacagcagcgtctgtcaaagcaggcaaacgacaacaacaacagcaactttccctggactgcggctacaaagtatcatctaaatggtcgggactcgttggttaatccaggaccagctatggccagccacaaagacgatgaagaaaagtttttccccatgcatggaaccctgatatttggtaaacaaggaacaaatgctaacgacgcggatttggaacatgtcatgattacagatgaagaagaaatcaggaccaccaatcccgtggctacagagcagtacggaaacgtgtcaaataatttgcaaaactcaaatactggtccaactacagaaaatgtcaatcaccagggagcgttacctggtatggtgtggcaggatcgagacgtgtacctgcagggacccatttgggccaagattcctcacaccgacggacactttcacccttctccactgatgggaggttttggactcaaacacccgcctcctcaaatcatgatcaaaaacactcctgttccagccaatcctcctacaaacttcagcgcggcaaagtttgcttccttcatcacacagtattccacgggacaggtcagcgtggagatcgagtgggagctgcagaaggagaacagcaaacgctggaaccccgagatccagtacacttccaactacaacaaatctgttaatgtggactttactgtggacactaatggtgtgtattcagagcctcgccccattggcaccagatacctgactcgtaatctgtaa

SEQ ID NO: 4428 - DNA, 2208 bp, Artificial Sequence
  source: /note="Description of Artificial Sequence: Synthetic polynucleotide"
atggctgccgatggttatcttccagattggctcgaggacactctctctgaaggaataagacagtggtggaagctcaaacctggcccaccaccaccaaagcccgcagagcggcatcaggacgacagcaggggtcttgtgcttcctgggtacaagtacctcggacccttcaacggactcgacaaaggagagccggtcaacgaggcagacgctgcggccctcgagcacgacaaggcctacgaccggcagctcgacagcggagacaacccgtacctcaagtacaaccacgccgacgcggagtttcaggagcgtcttaaagaagatacgtcttttgggggcaacctcggacgagcagtcttccaggcgaaaaagagggttcttgaacctctgggcctggttgaggaacctgttaagacggctccgggaaaaaagaggccggtagagcactctcctgcggagccagactcctcctcgggaaccggaaaagcgggccagcagcctgcaagaaagagattgaatttcggtcagactggagacgcagactccgtacctgacccccagcctctcggacagccaccagcagcccccacaagtttgggatctactacaatggctacaggcagtggcgcaccaatggcagacaataacgagggtgccgatggagtgggtaattcctcaggaaattggcattgcgattcccaatggctgggcgacagagtcatcaccaccagcacccgaacctgggccctgcccacctacaacaaccacctctacaagcaaatctccagccaatcaggagcatcgaacgacaaccactactttggctacagcaccccttgggggtattttgacttcaacagattccactgtcacttctccccacgtgactggcaaagactcatcaacaacaactggggattccgacccaagagactcaacttcaagctctttaacattcaagtcaaagaggtcacgcagaatgacggtacgacgacgattgccaataaccttaccagcacggttcaggtgtttactgactcggagtaccagctcccgtacgtcctcggctcggcgcatcaaggatgcctcccgccgtttccagcggacgtcttcatggtcccacagtatggatacctcaccctgaacaacgggagtcaggcggtaggacgctcttccttttactgcctggagtactttccttctcagatgctgcgtaccggaaacaactttaccttcagctacacctttgaggacgtgcctttccacagcagctacgctcacagccagagtttggaccggctgatgaatcctctgatcgaccagtatctgtattatctgaacaggacacaatcaaatagtggaactcttcagcagtctaggctactgtttagccaagctggacccaccagcatgtctcttcaagctaaaaactggctgcctggaccttgctacagacagcagcgtctgtcaaagcaggcaaacgacaacaacaacagcaactttccctggactgcggctacaaagtatcatctaaatggtcgggactcgttggttaatccaggaccagctatggccagccacaaagacgatgaagaaaagtttttccccatgcatggaaccctgatatttggtaaacaaggaacaaatgctaacgacgcggatttggaacatgtcatgattacagatgaagaagaaatcaggaccaccaatcccgtggctacagagcagtacggaaacgtgtcaaataatttgcaaaactcaaatactggtccaactacagaaaatgccaatcaccagggagcgttacctggtatggtgtggcaggatcgagacgtgtacctgcagggacccatttgggccaagattcctcacaccgacggacactttcacccttctccactgatgggaggttttggactcaaacacccgcctcctcaaatcatgatcaaaaacactcctgttccagccaatcctcctacaaacttcagcgcggcaaagtttgcttccttcatcacacagtattccacgggacaggtcagcgtggagatcgagtgggagctgcagaaggagaacagcaaacgctggaaccccgagatccagtacacttccaactacaacaaatctgttaatgtggactttactgtggacactaatggtgtgtattcagagcctcgccccattggcaccagatacctgactcgtaatctgtaa

SEQ ID NO: 4429 - DNA, 2208 bp, Artificial Sequence
  source: /note="Description of Artificial Sequence: Synthetic polynucleotide"
atggctgccgatggttatcttccagattggctcgaggacactccctctgaaggaataagacagtggtggaagctcaaacctggcccaccaccaccaaagcccgcagagcggcatcaggacgacagcaggggtcttgtgcttcctgggtacaagtacctcggacccttcaacggactcgacaaaggagagccggtcaacgaggcagacgctgcggccctcgagcacgacaaggcctacgaccggcagctcgacagcggagacaacccgtacctcaagtacaaccacgccgacgcggagtttcaggagcgtcttaaagaagatacgtcttttgggggcaacctcggacgagcagtcttccaggcgaaaaagagggttcttgaacctctgggcctggttgaggaacctgttaagacggctccgggaaaaaagaggccggtagagcactctcctgcggagccagactcctcctcgggaaccggaaaagcgggccagcagcctgcaagaaagagattgaatttcggtcagactggagacgcagactccgtacctgacccccagcctctcggacagccaccagcagcccccacaagtttgggatctactacaatggctacaggcagtggcgcaccaatggcagacaataacgagggtgccgatggagtgggtaattcctcaggaaattggcattgcgattcccaatggctgggcgacagagtcatcaccaccagcacccgaacctgggccctgcccacctacaacaaccacctctacaagcaaatctccagccaatcaggagcatcgaacgacaaccactactttggctacagcaccccttgggggtattttgacttcaacagattccactgtcacttctccccacgtgactggcaaagactcatcaacaacaactggggattccgacccaagagactcaacttcaagctctttaacattcaagtcaaagaggtcacgcagaatgacggtacgacgacgattgccaataaccttaccagcacggttcaggtgtttactgactcggagtaccagctcccgtacgtcctcggctcggcgcatcaaggatgcctcccgccgtttccagcggacgtcttcatggtcccacagtatggatacctcaccctgaacaacgggagtcaggcggtaggacgctcttccttttactgcctggagtactttccttctcagatgctgcgtaccggaaacaactttaccttcagctacacctttgaggacgtgcctttccacagcagctacgctcacagccagagtttggaccggctgatgaatcctctgatcgaccagtatctgtattatctgaacaggacacaatcaaatagtggaactcttcagcagtctaggctactgtttagccaagctggacccaccagcatgtctcttcaagctaaaaactggctgcctggaccttgctacagacagcagcgtctgtcaaagcaggcaaacgacaacaacaacagcaactttccctggactgcggctacaaagtatcatctaaatggtcgggactcgttggttaatccaggaccagctatggccagccacaaagacgatgaagaaaagtttttccccatgcatggaaccctgatatttggtaaacaaggaacaaatgctaacgacgcggatttggaacatgtcatgattacagatgaagaagaaatcaggaccaccaatcccgtggctacagagcagtacggaaacgtgtcaaataatttgcaaaactcaaatactggtccaactacagaaaatgtcaatcaccagggagcgttacctggtatggtgtggcaggatcgagacgtgtacctgcagggacccatttgggccaagattcctcacaccgacggacactttcacccttctccactgatgggaggttttggactcaaacacccgcctcctcaaatcatgatcaaaaacactcctgttccagccaatcctcctacaaacttcagcgcggcaaagtttgcttccttcatcacacagtattccacgggacaggtcagcgtggagatcgagtgggagctgcagaaggagaacagcaaacgctggaaccccgagatccagtacacttccaactacaacaaatctgttaatgtggactttactgtggacactaatggtgtgtattcagagcctcgccccattggcaccagatacctgactcgtaatctgtaa

SEQ ID NO: 4430 - DNA, 2208 bp, Artificial Sequence
  source: /note="Description of Artificial Sequence: Synthetic polynucleotide"
atggctgccgatggttatcttccagattggctcgaggacactctctctgaaggaataagacagtggtggaagctcaaacctggcccaccaccaccaaagcccgcagagcggcatcaggacgacagcaggggtcttgtgcttcctgggtacaagtacctcggacccttcaacggactcgacaaaggagagccggtcaacgaggcagacgctgcggccctcgagcacgacaaggcctacgaccggcagctcgacagcggagacaacccgtacctcaagtacaaccacgccgacgcggagtttcaggagcgtcttaaagaagatacgtcttttgggggcaacctcggacgagcagtcttccaggcgaaaaagagggttcttgaacctctgggcctggttgaggaacctgttaagacggctccgggaaaaaagaggccggtagagcactctcctgcggagccagactcctcctcgggaaccggaaaagcgggccagcagcctgcaagaaagagattgaatttcggtcagactggagacgcagactccgtacctgacccccagcctctcggacagccaccagcagcccccacaagtttgggatctactacaatggctacaggcagtggcgcaccaatggcagacaataacgagggtgccgatggagtgggtaattcctcaggaaattggcattgcgattcccaatggctgggcgacagagtcatcaccaccagcacccgaacctgggccctgcccacctacaacaaccacctctacaagcaaatctccagccaatcaggagcatcgaacgacaaccactactttggctacagcaccccttgggggtattttgacttcaacagattccactgtcacttctccccacgtgactggcaaagactcatcaacaacaactggggattccgacccaagagactcaacttcaggctctttaacattcaagtcaaagaggtcacgcagaatgacggtacgacgacgattgccaataaccttaccagcacggttcaggtgtttactgactcggagtaccagctcccgtacgtcctcggctcggcgcatcaaggatgcctcccgccgtttccagcggacgtcttcatggtcccacagtatggatacctcaccctgaacaacgggagtcaggcggtaggacgctcttccttttactgcctggagtactttccttctcagatgctgcgtaccggaaacaactttaccttcagctacacctttgaggacgtgcctttccacagcagctacgctcacagccagagtttggaccggctgatgaatcctctgatcgaccagtatctgtattatctgaacaggacacaatcaaatagtggaactcttcagcagtctaggctactgtttagccaagctggacccaccagcatgtctcttcaagctaaaaactggctgcctggaccttgctacagacagcagcgtctgtcaaagcaggcaaacgacaacaacaacagcaactttccctggactgcggctacaaagtatcatctaaatggtcgggactcgttggttaatccaggaccagctatggccagccacaaagacgatgaagaaaagtttttccccatgcatggaaccctgatatttggtaaacaaggaacaaatgctaacgacgcggatttggaacatgtcatgattacagatgaagaagaaatcaggaccaccaatcccgtggctacagagcagtacggaaacgtgtcaaataatttgcaaaactcaaatactggtccaactacagaaaatgtcaatcaccagggagcgttacctggtatggtgtggcaggatcgagacgtgtacctgcagggacccatttgggccaagattcctcacaccgacggacactttcacccttctccactgatgggaggttttggactcaaacacccgcctcctcaaatcatgatcaaaaacactcctgttccagccaatcctcctacaaacttcagcgcggcaaagtttgcttccttcatcacacagtattccacgggacaggtcagcgtggagatcgagtgggagctgcagaaggagaacagcaaacgctggaaccccgagatccagtacacttccaactacaacaaatctgttaatgtggactttactgtggacactaatggtgtgtattcagagcctcgccccattggcaccagatacctgactcgtaatctgtaa

SEQ ID NO: 4431 - DNA, 2208 bp, Artificial Sequence
  source: /note="Description of Artificial Sequence: Synthetic polynucleotide"
atggctgccgatggttatcttccagattggctcgaggacactctctctgaaggaataagacagtggtggaagctcaaacctggcccaccaccaccaaagcccgcagagcggcatcaggacgacagcaggggtcttgtgcttcctgggtacaagtacctcggacccttcaacggactcgacaaaggagagccggtcaacgaggcagacgctgcggccctcgagcacgacaaggcctacgaccggcagctcgacagcggagacaacccgtacctcaagtacaaccacgccgacgcggagtttcaggagcgtcttaaagaagatacgtcttttgggggcaacctcggacgagcagtcttccaggcgaaaaagagggttcttgaacctctgggcctggttgaggaacctgttaagacggctccgggaaaaaagaggccggtagagcactctcctgcggagccagactcctcctcgggaaccggaaaagcgggccagcagcctgcaagaaagagattgaatttcggtcaggctggagacgcagactccgtacctgacccccagcctctcggacagccaccagcagcccccacaagtttgggatctactacaatggctacaggcagtggcgcaccaatggcagacaataacgagggtgccgatggagtgggtaattcctcaggaaattggcattgcgattcccaatggctgggcgacagagtcatcaccaccagcacccgaacctgggccctgcccacctacaacaaccacctctacaagcaaatctccagccaatcaggagcatcgaacgacaaccactactttggctacagcaccccttgggggtattttgacttcaacagattccactgtcacttctccccacgtgactggcaaagactcatcaacaacaactggggattccgacccaagagactcaacttcaagctctttaacattcaagtcaaagaggtcacgcagaatgacggtacgacgacgattgccaataaccttaccagcacggttcaggtgtttactgactcggagtaccagctcccgtacgtcctcggctcggcgcatcaaggatgcctcccgccgtttccagcggacgtcttcatggtcccacagtatggatacctcaccctgaacaacgggagtcaggcggtaggacgctcttccttttactgcctggagtactttccttctcagatgctgcgtaccggaaacaactttaccttcagctacacctttgaggacgtgcctttccacagcagctacgctcacagccagagtttggaccggctgatgaatcctctgatcgaccagtatctgtattatctgaacaggacacaatcaaatagtggaactcttcagcagtctaggctactgtttagccaagctggacccaccagcatgtctcttcaagctaaaaactggctgcctggaccttgctacagacagcagcgtctgtcaaagcaggcaaacgacaacaacaacagcaactttccctggactgcggctacaaagtatcatctaaatggtcgggactcgttggttaatccaggaccagctatggccagccacaaagacgatgaagaaaagtttttccccatgcatggaaccctgatatttggtaaacaaggaacaaatgctaacgacgcggatttggaacatgtcatgattacagatgaagaagaaatcaggaccaccaatcccgtggctacagagcagtacggaaacgtgtcaaataatttgcaaaactcaaatactggtccaactacagaaaatgtcaatcaccagggagcgttacctggtatggtgtggcaggatcgagacgtgtacctgcagggacccatttgggccaagattcctcacaccgacggacactttcacccttctccactgatgggaggttttggactcaaacacccgcctcctcaaatcatgatcaaaaacactcctgttccagccaatcctcctacaaacttcagcgcggcaaagtttgcttccttcatcacacagtattccacgggacaggtcagcgtggagatcgagtgggagctgcagaaggagaacagcaaacgctggaaccccgagatccagtacacttccaactacaacaaatctgttaatgtggactttactgtggacactaatggtgtgtattcagagcctcgccccattggcaccagatacctgactcgtaatctgtaa

SEQ ID NO: 4432 - DNA, 2208 bp, Artificial Sequence
  source: /note="Description of Artificial Sequence: Synthetic polynucleotide"
atggctgccgatggttatcttccagattggctcgaggacactctctctgaaggaataagacagtggtggaagctcaaacctggcccaccaccaccaaagcccgcagagcggcatcaggacgacagcaggggtcttgtgcttcctgggtacaagtacctcggacccttcaacggactcgacaaaggagagccggtcaacgaggcagacgctgcggccctcgagcacgacaaggcctacgaccggcagctcgacagcggagacaacccgtacctcaagtacaaccacgccgacgcggagtttcaggagcgtcttaaagaagatacgtcttttgggggcaacctcggacgagcagtcttccaggcgaaaaagagggttcttgaacctctgggcctggttgaggaacctgttaagacggctccgggaaaaaagaggccggtagagcactctcctgcggagccagactcctcctcgggaaccggaaaagcgggccagcagcctgcaagaaagagattgaatttcggtcagactggagacgcagactccgtacctgacccccagcctctcggacagccaccagcagcccccacaagtttgggatctactacagtggctacaggcagtggcgcaccaatggcagacaataacgagggtgccgatggagtgggtaattcctcaggaaattggcattgcgattcccaatggctgggcgacagagtcatcaccaccagcacccgaacctgggccctgcccacctacaacaaccacctctacaagcaaatctccagccaatcaggagcatcgaacgacaaccactactttggctacagcaccccttgggggtattttgacttcaacagattccactgtcacttctccccacgtgactggcaaagactcatcaacaacaactggggattccgacccaagagactcaacttcaagctctttaacattcaagtcaaagaggtcacgcagaatgacggtacgacgacgattgccaataaccttaccagcacggttcaggtgtttactgactcggagtaccagctcccgtacgtcctcggctcggcgcatcaaggatgcctcccgccgtttccagcggacgtcttcatggtcccacagtatggatacctcaccctgaacaacgggagtcaggcggtaggacgctcttccttttactgcctggagtactttccttctcagatgctgcgtaccggaaacaactttaccttcagctacacctttgaggacgtgcctttccacagcagctacgctcacagccagagtttggaccggctgatgaatcctctgatcgaccagtatctgtattatctgaacaggacacaatcaaatagtggaactcttcagcagtctaggctactgtttagccaagctggacccaccagcatgtctcttcaagctaaaaactggctgcctggaccttgctacagacagcagcgtctgtcaaagcaggcaaacgacaacaacaacagcaactttccctggactgcggctacaaagtatcatctaaatggtcgggactcgttggttaatccaggaccagctatggccagccacaaagacgatgaagaaaagtttttccccatgcatggaaccctgatatttggtaaacaaggaacaaatgctaacgacgcggatttggaacatgtcatgattacagatgaagaagaaatcaggaccaccaatcccgtggctacagagcagtacggaaacgtgtcaaataatttgcaaaactcaaatactggtccaactacagaaaatgtcaatcaccagggagcgttacctggtatggtgtggcaggatcgagacgtgtacctgcagggacccatttgggccaagattcctcacaccgacggacactttcacccttctccactgatgggaggttttggactcaaacacccgcctcctcaaatcatgatcaaaaacactcctgttccagccaatcctcctacaaacttcagcgcggcaaagtttgcttccttcatcacacagtattccacgggacaggtcagcgtggagatcgagtgggagctgcagaaggagaacagcaaacgctggaaccccgagatccagtacacttccaactacaacaaatctgttaatgtggactttactgtggacactaatggtgtgtattcagagcctcgccccattggcaccagatacctgactcgtaatctgtaa

SEQ ID NO: 4433 - DNA, 2208 bp, Artificial Sequence
  source: /note="Description of Artificial Sequence: Synthetic polynucleotide"
atggctgccgatggttatcttccagattggctcgaggacactctctctgaaggaataagacagtggtggaagctcaaacctggcccaccaccaccaaagcccgcagagcggcatcaggacgacagcaggggtcttgtgcttcctgggtacaagtacctcggacccttcaacggactcgacaaaggagagccggtcaacgaggcagacgctgcggccctcgagcacgacaaggcctacgaccggcagctcgacagcggagacaacccgtacctcaagtacaaccacgccgacgcggagtttcaggagcgtcttaaagaagatacgtcttttgggggcaacctcggacgagcagtcttccaggcgaaaaagagggttcttgaacctctgggcctggttgaggaacctgttaagacggctccgggaaaaaagaggccggtagagcactctcctgcggagccagactcctcctcgggaaccggaaaagcgggccagcagcctgcaagaaagagattgaatttcggtcagactggagacgcagactccgtacctgacccccagcctctcggacagccaccagcagcccccacaagtttgggatctactacaatggctacaggcagtggcgcaccaatggcagacaataacgagggtgccgatggagtgggtaattcctcaggaaattggcattgcgattcccaatggctgggcgacagagtcatcaccaccagcacccgaacctgggccctgcccacctacaacaaccacctctacaagcaaatctccagccaatcaggagcatcgaacgacaaccactactttggctacagcaccccttgggggtattttgacttcaacagattccactgtcacttctccccacgtgactggcaaagactcatcaacaacaactggggattccgacccaagagactcaacttcaagctctttaacattcaagtcaaagaggtcacgcagaatgacggtacgacgacgattgccaataaccttaccagcacggttcaggtgtttactgactcggagtaccagctcccgtacgtcctcggctcggcgcatcaaggatgcctcccgccgtttccagcggacgtcttcatggtcccacagtatggatacctcaccctgaacaacgggagtcaggcggtaggacgctcttccttttactgcctggagtactttccttctcagatgctgcgtaccggaaacaactttaccttcagctacacctttgaggacgtgcctttccacagcagctacgctcacagccagagtttggaccggctgatgaatcctctgatcgaccagtatctgtattatctgaacaggacacaatcaaatagtggaactcttcagcagtctaggctactgtttagccaagctggacccaccagcatgtctcttcaagctaaaaactggctgcctggaccttgctacagacagcagcgtctgtcaaagcaggcaaacgacaacaacaacagcaactttccctggactgcggctacaaagtatcatctaaatggtcgggactcgttggttaatccaggaccagctatggccagccacaaaggcgatgaagaaaagtttttccccatgcatggaaccctgatatttggtaaacaaggaacaaatgctaacgacgcggatttggaacatgtcatgattacagatgaagaagaaatcaggaccaccaatcccgtggctacagagcagtacggaaacgtgtcaaataatttgcaaaactcaaatactggtccaactacagaaaatgtcaatcaccagggagcgttacctggtatggtgtggcaggatcgagacgtgtacctgcagggacccatttgggccaagattcctcacaccgacggacactttcacccttctccactgatgggaggttttggactcaaacacccgcctcctcaaatcatgatcaaaaacactcctgttccagccaatcctcctacaaacttcagcgcggcaaagtttgcttccttcatcacacagtattccacgggacaggtcagcgtggagatcgagtgggagctgcagaaggagaacagcaaacgctggaaccccgagatccagtacacttccaactacaacaaatctgttaatgtggactttactgtggacactaatggtgtgtattcagagcctcgccccattggcaccagatacctgactcgtaatctgtaa

SEQ ID NO: 4434 - DNA, 2208 bp, Artificial Sequence
  source: /note="Description of Artificial Sequence: Synthetic polynucleotide"
atggctgccgatggttatcttccagattggctcgaggacactctctctgaaggaataagacagtggtggaagctcaaacctggcccaccaccaccaaagcccgcagagcggcatcaggacgacagcaggggtcttgtgcttcctgggtacaagtacctcggacccttcaacggactcgacaaaggagagccggtcaacgaggcagacgctgcggccctcgagcacgacaaggcctacgaccggcagctcgacagcggagacaacccgtacctcaagtacaaccacgccgacgcggagtttcaggagcgtcttaaagaagatacgtcttttgggggcaacctcggacgagcagtcttccaggcgaaaaagagggttcttgaacctctgggcctggttgaggaacctgttaagacggctccgggaaaaaagaggccggtagagcactctcctgcggagccagactcctcctcgggaaccggaaaagcgggccagcagcctgcaagaaagggattgaatttcggtcagactggagacgcagactccgtacctgacccccagcctctcggacagccaccagcagcccccacaagtttgggatctactacaatggctacaggcagtggcgcaccaatggcagacaataacgagggtgccgatggagtgggtaattcctcaggaaattggcattgcgattcccaatggctgggcgacagagtcatcaccaccagcacccgaacctgggccctgcccacctacaacaaccacctctacaagcaaatctccagccaatcaggagcatcgaacgacaaccactactttggctacagcaccccttgggggtattttgacttcaacagattccactgtcacttctccccacgtgactggcaaagactcatcaacaacaactggggattccgacccaagagactcaacttcaagctctttaacattcaagtcaaagaggtcacgcagaatgacggtacgacgacgattgccaataaccttaccagcacggttcaggtgtttactgactcggagtaccagctcccgtacgtcctcggctcggcgcatcaaggatgcctcccgccgtttccagcggacgtcttcatggtcccacagtatggatacctcaccctgaacaacgggagtcaggcggtaggacgctcttccttttactgcctggagtactttccttctcagatgctgcgtaccggaaacaactttaccttcagctacacctttgaggacgtgcctttccacagcagctacgctcacagccagagtttggaccggctgatgaatcctctgatcgaccagtatctgtattatctgaacaggacacaatcaaatagtggaactcttcagcagtctaggctactgtttagccaagctggacccaccagcatgtctcttcaagctaaaaactggctgcctggaccttgctacagacagcagcgtctgtcaaagcaggcaaacgacaacaacaacagcaactttccctggactgcggctacaaagtatcatctaaatggtcgggactcgttggttaatccaggaccagctatggccagccacaaagacgatgaagaaaagtttttccccatgcatggaaccctgatatttggtaaacaaggaacaaatgctaacgacgcggatttggaacatgtcatgattacagatgaagaagaaatcaggaccaccaatcccgtggctacagagcagtacggaaacgtgtcaaataatttgcaaaactcaaatactggtccaactacagaaaatgtcaatcaccagggagcgttacctggtatggtgtggcaggatcgagacgtgtacctgcagggacccatttgggccaagattcctcacaccgacggacactttcacccttctccactgatgggaggttttggactcaaacacccgcctcctcaaatcatgatcaaaaacactcctgttccagccaatcctcctacaaacttcagcgcggcaaagtttgcttccttcatcacacagtattccacgggacaggtcagcgtggagatcgagtgggagctgcagaaggagaacagcaaacgctggaaccccgagatccagtacacttccaactacaacaaatctgttaatgtggactttactgtggacactaatggtgtgtattcagagcctcgccccattggcaccagatacctgactcgtaatctgtaa

SEQ ID NO: 4435 - DNA, 2208 bp, Artificial Sequence
  source: /note="Description of Artificial Sequence: Synthetic polynucleotide"
atggctgccgatggttatcttccagattggctcgaggacactctctctgaaggaataagacagtggtggaagctcaaacctggcccaccaccaccaaagcccgcagagcggcatcaggacgacagcaggggtcttgtgcttcctgggtacaagtacctcggacccttcaacggactcgacaaaggagagccggtcaacgaggcagacgctgcggccctcgagcacgacaaggcctacgaccggcagctcgacagcggagacaacccgtacctcaagtacaaccacgccgacgcggagtttcaggagcgtcttaaagaagatacgtcttttgggggcaacctcggacgagcagtcttccaggcgaaaaagagggttcttgaacctctgggcctggttgaggaacctgttaagacggctccgggaaaaaagaggccggtagagcactctcctgcggagccagactcctcctcgggaaccggaaaagcgggccagcagcctgcaagaaagagattgaatttcggtcagactggagacgcagactccgtacctgacccccagcctctcggacagccaccagcagcccccacaagtttgggatctactacaatggctacaggcagtggcgcaccaatggcagacaataacgagggtgccgatggagtgggtaattcctcaggaaattggcattgcgattcccaatggctgggcgacagagtcatcaccaccagcacccgaacctgggccctgcccacctacaacaaccacctctacaagcaaatctccagccaatcaggagcatcgaacgacaaccactactttggctacagcaccccttgggggtattttgacttcaacagattccactgtcacttctccccacgtgactggcaaagactcatcaacaacaactggggattccgacccaagagactcaacttcaagctctttaacattcaagtcaaagaggtcacgcagaatgacggtacggcgacgattgccaataaccttaccagcacggttcaggtgtttactgactcggagtaccagctcccgtacgtcctcggctcggcgcatcaaggatgcctcccgccgtttccagcggacgtcttcatggtcccacagtatggatacctcaccctgaacaacgggagtcaggcggtaggacgctcttccttttactgcctggagtactttccttctcagatgctgcgtaccggaaacaactttaccttcagctacacctttgaggacgtgcctttccacagcagctacgctcacagccagagtttggaccggctgatgaatcctctgatcgaccagtatctgtattatctgaacaggacacaatcaaatagtggaactcttcagcagtctaggctactgtttagccaagctggacccaccagcatgtctcttcaagctaaaaactggctgcctggaccttgctacagacagcagcgtctgtcaaagcaggcaaacgacaacaacaacagcaactttccctggactgcggctacaaagtatcatctaaatggtcgggactcgttggttaatccaggaccagctatggccagccacaaagacgatgaagaaaagtttttccccatgcatggaaccctgatatttggtaaacaaggaacaaatgctaacgacgcggatttggaacatgtcatgattacagatgaagaagaaatcaggaccaccaatcccgtggctacagagcagtacggaaacgtgtcaaataatttgcaaaactcaaatactggtccaactacagaaaatgtcaatcaccagggagcgttacctggtatggtgtggcaggatcgagacgtgtacctgcagggacccatttgggccaagattcctcacaccgacggacactttcacccttctccactgatgggaggttttggactcaaacacccgcctcctcaaatcatgatcaaaaacactcctgttccagccaatcctcctacaaacttcagcgcggcaaagtttgcttccttcatcacacagtattccacgggacaggtcagcgtggagatcgagtgggagctgcagaaggagaacagcaaacgctggaaccccgagatccagtacacttccaactacaacaaatctgttaatgtggactttactgtggacactaatggtgtgtattcagagcctcgccccattggcaccagatacctgactcgtaatctgtaa

SEQ ID NO: 4436 - DNA, 2208 bp, Artificial Sequence
  source: /note="Description of Artificial Sequence: Synthetic polynucleotide"
atggctgccgatggttatcttccagattggctcgaggacactctctctgaaggaataagacagtggtggaagctcaaacctggcccaccaccaccaaagcccgcagagcggcatcaggacgacagcaggggtcttgtgcttcctgggtacaagtacctcggacccttcaacggactcgacaaaggagagccggtcaacgaggcagacgctgcggccctcgagcacgacaaggcctacgaccggcagctcgacagcggagacaacccgtacctcaagtacaaccacgccgacgcggagtttcaggagcgtcttaaagaagatacgtcttttgggggcaacctcggacgagcagtcttccaggcgaaaaagagggttcttgaacctctgggcctggttgaggaacctgttaagacggctccgggaaaaaagaggccggtagagcactctcctgcggagccagactcctcctcgggaaccggaaaagcgggccagcagcctgcaagaaggagattgaatttcggtcagactggagacgcagactccgtacctgacccccagcctctcggacagccaccagcagcccccacaagtttgggatctactacaatggctacaggcagtggcgcaccaatggcagacaataacgagggtgccgatggagtgggtaattcctcaggaaattggcattgcgattcccaatggctgggcgacagagtcatcaccaccagcacccgaacctgggccctgcccacctacaacaaccacctctacaagcaaatctccagccaatcaggagcatcgaacgacaaccactactttggctacagcaccccttgggggtattttgacttcaacagattccactgtcacttctccccacgtgactggcaaagactcatcaacaacaactggggattccgacccaagagactcaacttcaagctctttaacattcaagtcaaagaggtcacgcagaatgacggtacgacgacgattgccaataaccttaccagcacggttcaggtgtttactgactcggagtaccagctcccgtacgtcctcggctcggcgcatcaaggatgcctcccgccgtttccagcggacgtcttcatggtcccacagtatggatacctcaccctgaacaacgggagtcaggcggtaggacgctcttccttttactgcctggagtactttccttctcagatgctgcgtaccggaaacaactttaccttcagctacacctttgaggacgtgcctttccacagcagctacgctcacagccagagtttggaccggctgatgaatcctctgatcgaccagtatctgtattatctgaacaggacacaatcaaatagtggaactcttcagcagtctaggctactgtttagccaagctggacccaccagcatgtctcttcaagctaaaaactggctgcctggaccttgctacagacagcagcgtctgtcaaagcaggcaaacgacaacaacaacagcaactttccctggactgcggctacaaagtatcatctaaatggtcgggactcgttggttaatccaggaccagctatggccagccacaaagacgatgaagaaaagtttttccccatgcatggaaccctgatatttggtaaacaaggaacaaatgctaacgacgcggatttggaacatgtcatgattacagatgaagaagaaatcaggaccaccaatcccgtggctacagagcagtacggaaacgtgtcaaataatttgcaaaactcaaatactggtccaactacagaaaatgtcaatcaccagggagcgttacctggtatggtgtggcaggatcgagacgtgtacctgcagggacccatttgggccaagattcctcacaccgacggacactttcacccttctccactgatgggaggttttggactcaaacacccgcctcctcaaatcatgatcaaaaacactcctgttccagccaatcctcctacaaacttcagcgcggcaaagtttgcttccttcatcacacagtattccacgggacaggtcagcgtggagatcgagtgggagctgcagaaggagaacagcaaacgctggaaccccgagatccagtacacttccaactacaacaaatctgttaatgtggactttactgtggacactaatggtgtgtattcagagcctcgccccattggcaccagatacctgactcgtaatctgtaa

SEQ ID NO: 4437 - DNA, 2208 bp, Artificial Sequence
  source: /note="Description of Artificial Sequence: Synthetic polynucleotide"
atggctgccgatggttatcttccagattggctcgaggacactctctctgaaggaataagacagtggtggaagctcaaacctggcccaccaccaccaaagcccgcagagcggcatcaggacgacagcaggggtcttgtgcttcctgggtacaagtacctcggacccttcaacggactcgacaaaggagagccggtcaacgaggcagacgctgcggccctcgagcacgacaaggcctacgaccggcagctcgacagcggagacaacccgtacctcaagtacaaccacgccgacgcggagtttcaggagcgtcttaaagaagatacgtcttttgggggcaacctcggacgagcagtcttccaggcgaaaaagagggttcttgaacctctgggcctggttgaggaacctgttaagacggctccgggaaaaaagaggccggtagagcactctcctgcggagccagactcctcctcgggaaccggaaaagcgggccagcagcctgcaagaaagagattgaatttcggtcagactggagacgcagactccgtacctgacccccagcctctcggacagccaccagcagcccccacaagtttgggatctactacaatggctacaggcagtggcgcaccaatggcagacaataacgagggtgccgatggagtgggtaattcctcaggaaattggcattgcgattcccaatggctgggcgacagagtcatcaccaccagcacccgaacctgggccctgcccacctacaacaaccacctctacaagcaaatctccagccaatcaggagcatcgaacgacaaccactactttggctacagcaccccttgggggtattttgacttcaacagattccactgtcacttctccccacgtgactggcaaagactcatcaacaacaactggggattccgacccaagagactcaacttcaagctctttaacattcaagtcaaagaggtcacgcagaatgacggtacgacgacgattgccaataaccttaccagcacggttcaggtgtttactgactcggagtaccagctcccgtacgtcctcggctcggcgcatcaaggatgcctcccgccgtttccagcggacgtcttcatggtcccacagtatggatacctcaccctgaacaacgggagtcaggcggtaggacgctcttccttttactgcctggagtactttccttctcagatgctgcgtaccggaaacaactttaccttcagctacacctttgaggacgtgcctttccacagcagctacgctcacagccagagtttggaccggctgatgaatcctctgatcgaccagtatctgtattatctgaacaggacacaatcaaatagtggaactcttcagcagtctaggctactgtttagccaagctggacccaccagcatgtctcttcaagctaaaaactggctgcctggaccttgctacagacagcagcgtctgtcaaagcaggcaaacgacaacaacaacagcaactttccctggactgcggctacaaagtatcatctaaatggtcgggactcgttggttaatccaggaccagctatggccagccacaaagacgatgaagaaaagtttttccccatgcatggaaccctgatatttggtaaacaaggaacaaatgctaacgacgcggatttggaacatgtcatgattacagatgaagaagaaatcaggaccaccaatcccgtggctacagagcagtacggaaacgtgtcaaataatttgcaaaactcaaatactggtccaactacagaaaatgtcaatcaccagggagcgttacctggtatggtgtggcaggatcgagacgtgtacctgcagggacccatttgggccaagattcctcacaccgacggacactttcacccttctccactgatgggaggttttggactcaaacacccgcctcctcaaatcatgatcaaaaacactcctgttccagccaatcctcctacaaacttcagcgcggcaaagtttgcttccctcatcacacagtattccacgggacaggtcagcgtggagatcgagtgggagctgcagaaggagaacagcaaacgctggaaccccgagatccagtacacttccaactacaacaaatctgttaatgtggactttactgtggacactaatggtgtgtattcagagcctcgccccattggcaccagatacctgactcgtaatctgtaa

SEQ ID NO: 4438 - DNA, 2208 bp, Artificial Sequence
  source: /note="Description of Artificial Sequence: Synthetic polynucleotide"
atggctgccgatggttatcttccagattggctcgaggacactctctctgaaggaataagacagtggtggaagctcaaacctggcccaccaccaccaaagcccgcagagcggcatcaggacgacagcaggggtcttgtgcttcctgggtacaagtacctcggacccttcaacggactcgacaaaggagagccggtcaacgaggcagacgctgcggccctcgagcacgacaaggcctacgaccggcagctcgacagcggagacaacccgtacctcaagtacaaccacgccgacgcggagtttcaggagcgtcttaaagaagatacgtcttttgggggcaacctcggacgagcagtcttccaggcgaaaaagagggttcttgaacctctgggcctggttgaggaacctgttaagacggctccgggaaaaaagaggccggtagagcactctcctgcggagccagactcctcctcgggaaccggaaaagcgggccagcagcctgcaagaaagagattgaatttcggtcagactggagacgcagactccgtacctgacccccagcctctcggacagccaccagcagcccccacaagtttgggatctactacaatggctacaggcagtggcgcaccaatggcagacaataacgagggtgccgatggagtgggtaattcctcaggaaattggcattgcgattcccaatggctgggcgacagagtcatcaccaccagcacccgaacctgggccctgcccacctacaacaaccacctctacaagcaaatctccagccaatcaggagcatcgaacgacaaccactactttggctacagcaccccttgggggtattttgacttcaacagattccactgtcacttctccccacgtgactggcaaagactcatcaacaacaactggggattccgacccaagagactcagcttcaagctctttaacattcaagtcaaagaggtcacgcagaatgacggtacgacgacgattgccaataaccttaccagcacggttcaggtgtttactgactcggagtaccagctcccgtacgtcctcggctcggcgcatcaaggatgcctcccgccgtttccagcggacgtcttcatggtcccacagtatggatacctcaccctgaacaacgggagtcaggcggtaggacgctcttccttttactgcctggagtactttccttctcagatgctgcgtaccggaaacaactttaccttcagctacacctttgaggacgtgcctttccacagcagctacgctcacagccagagtttggaccggctgatgaatcctctgatcgaccagtatctgtattatctgaacaggacacaatcaaatagtggaactcttcagcagtctaggctactgtttagccaagctggacccaccagcatgtctcttcaagctaaaaactggctgcctggaccttgctacagacagcagcgtctgtcaaagcaggcaaacgacaacaacaacagcaactttccctggactgcggctacaaagtatcatctaaatggtcgggactcgttggttaatccaggaccagctatggccagccacaaagacgatgaagaaaagtttttccccatgcatggaaccctgatatttggtaaacaaggaacaaatgctaacgacgcggatttggaacatgtcatgattacagatgaagaagaaatcaggaccaccaatcccgtggctacagagcagtacggaaacgtgtcaaataatttgcaaaactcaaatactggtccaactacagaaaatgtcaatcaccagggagcgttacctggtatggtgtggcaggatcgagacgtgtacctgcagggacccatttgggccaagattcctcacaccgacggacactttcacccttctccactgatgggaggttttggactcaaacacccgcctcctcaaatcatgatcaaaaacactcctgttccagccaatcctcctacaaacttcagcgcggcaaagtttgcttccttcatcacacagtattccacgggacaggtcagcgtggagatcgagtgggagctgcagaaggagaacagcaaacgctggaaccccgagatccagtacacttccaactacaacaaatctgttaatgtggactttactgtggacactaatggtgtgtattcagagcctcgccccattggcaccagatacctgactcgtaatctgtaa

SEQ ID NO: 4439 - DNA, 2208 bp, Artificial Sequence
  source: /note="Description of Artificial Sequence: Synthetic polynucleotide"
atggctgccgatggttatcttccagattggctcgaggacactctctctgaaggaataagacagtggtggaagctcaaacctggcccaccaccaccaaagcccgcagagcggcatcaggacgacagcaggggtcttgtgcttcctgggtacaagtacctcggacccttcaacggactcgacaaaggagagccggtcaacgaggcagacgctgcggccctcgagcacgacaaggcctacgaccggcagctcgacagcggagacaacccgtacctcaagtacaaccacgccgacgcggagtttcaggagcgtcttaaagaagatacgtcttttgggggcaacctcggacgagcagtcttccaggcgaaaaagagggttcttgaacctctgggcctggttgaggaacctgttaagacggctccgggaaaaaagaggccggtagagcactctcctgcggagccagactcctcctcgggaaccggaaaagcgggccagcagcctgcaagaaagagattgaatttcggtcagactggagacgcagactccgtacctgacccccagcctctcggacagccaccagcagcccccacaagtttgggatctactacaatggctacaggcagtggcgcaccaatggcagacaataacgagggtgccgatggagtgggtaattcctcaggaaattggcattgcgattcccaatggctgggcgacagagtcatcaccaccagcacccgaacctgggccctgcccacctacaacaaccacctctacaagcaaatctccagccaatcaggagcatcgaacgacaaccactactttggctacagcaccccttgggggtattttgacttcaacagattccactgtcacttctccccacgtgactggcaaagactcatcaacaacaactggggattccgacccaagagactcaacttcaagctctttaacattcaagtcaaagaggtcacgcagaatgacggtacgacgacgattgccaataaccttaccagcacggttcaggtgtttactgactcggagtaccagctcccgtacgtcctcggctcggcgcatcaaggatgcctcccgccgtttccagcggacgtcttcatggtcccacagtatggatacctcaccctgaacaacgggagtcaggcggtaggacgctcttccttttactgcctggagtactttccttctcagatgctgcgtaccggaaacaactttaccttcagctacacctttgaggacgtgcctttccacagcagctacgctcacagccagagtttggaccggctgatgaatcctctgatcgaccagtatctgtattatctgaacaggacacaatcaaatagtggaactcttcagcagtctaggctactgtttagccaagctggacccaccagcatgtctcttcaagctaaaaactggctgcctggaccttgctacagacagcagcgtctgtcaaagcaggcaaacgacaacaacaacagcaactttccctggactgcggctacaaagtatcatctaaatggtcgggactcgttggttaatccaggaccagctatggccagccacaaagacgatgaagaaaagtttttccccatgcatggaaccctgatatttggtaaacaaggaacaaatgctaacgacgcggatttggaacatgtcatgattacagatgaagaagaaatcaggaccaccaatcccgtggctacagggcagtacggaaacgtgtcaaataatttgcaaaactcaaatactggtccaactacagaaaatgtcaatcaccagggagcgttacctggtatggtgtggcaggatcgagacgtgtacctgcagggacccatttgggccaagattcctcacaccgacggacactttcacccttctccactgatgggaggttttggactcaaacacccgcctcctcaaatcatgatcaaaaacactcctgttccagccaatcctcctacaaacttcagcgcggcaaagtttgcttccttcatcacacagtattccacgggacaggtcagcgtggagatcgagtgggagctgcagaaggagaacagcaaacgctggaaccccgagatccagtacacttccaactacaacaaatctgttaatgtggactttactgtggacactaatggtgtgtattcagagcctcgccccattggcaccagatacctgactcgtaatctgtaa

SEQ ID NO: 4440 - DNA, 2208 bp, Artificial Sequence
  source: /note="Description of Artificial Sequence: Synthetic polynucleotide"
atggctgccgatggttatcttccagattggctcgaggacactctctctgaaggaataagacagtggtggaagctcaaacctggcccaccaccaccaaagcccgcagagcggcatcaggacgacagcaggggtcttgtgcttcctgggtacaagtacctcggacccttcaacggactcgacaaaggagagccggtcaacgaggcagacgctgcggccctcgagcacgacaaggcctacgaccggcagctcgacagcggagacaacccgtacctcaagtacaaccacgccgacgcggagtttcaggagcgtcttaaagaagatacgtcttttgggggcaacctcggacgagcagtcttccaggcgaaaaagagggttcttgaacctctgggcctggttgaggaacctgttaagacggctccgggaaaaaagaggccggtagagcactctcctgcggagccagactcctcctcgggaaccggaaaagcgggccagcagcctgcaagaaagagattgaatttcggtcagactggagacgcagactccgtacctgacccccagcctctcggacagccaccagcagcccccacaagtttgggatctactacaatggctacaggcagtggcgcaccaatggcagacaataacgagggtgccgatggagtgggtaattcctcaggaaattggcattgcgattcccaatggctgggcgacagagtcatcaccaccagcacccgaacctgggccctgcccacctacaacaaccacctctacaagcaaatctccagccaatcaggagcatcgaacgacaaccactactttggctacagcaccccttgggggtattttgacttcaacagattccactgtcacttctccccacgtgactggcaaagactcatcaacaacaactggggattccgacccaagagactcaacttcaagctctttaacattcaagtcaaagaggtcacgcagaatgacggtacgacgacgattgccaataaccttaccagcacggttcaggtgtttactgactcggagtaccagctcccgtacgtcctcggctcggcgcatcaaggatgcctcccgccgtttccagcggacgtcttcatggtcccacagtatggatacctcaccctgaacaacgggagtcaggcggtaggacgctcttccttttactgcctggagtactttccttctcagatgctgcgtaccggaaacaactttaccttcagctacacctttgaggacgtgcctttccacagcagctacgctcacagccagagtttggaccggctgatgaatcctctgatcgaccagtatctgtattatctgaacaggacacaatcaaatagtggaactcttcagcagtctaggctactgtttagccaagctggacccaccagcatgtctcttcaagctaaaaactggctgcctggaccttgctacagacagcagcgtctgtcaaagcaggcaaacgacaacaacaacagcaactttccctggactgcggctacaaagtatcatctaaatggtcgggactcgttggttaatccaggaccagctatggccagccacaaagacgatgaagaaaagtttttccccatgcatggaaccctgatatttggtaaacaaggaacaaatgctaacgacgcggatttggaacatgtcatgattacagatgaagaagaaatcaggaccaccaatcccgtggctacagagcagtacggaaacgtgccaaataatttgcaaaactcaaatactggtccaactacagaaaatgtcaatcaccagggagcgttacctggtatggtgtggcaggatcgagacgtgtacctgcagggacccatttgggccaagattcctcacaccgacggacactttcacccttctccactgatgggaggttttggactcaaacacccgcctcctcaaatcatgatcaaaaacactcctgttccagccaatcctcctacaaacttcagcgcggcaaagtttgcttccttcatcacacagtattccacgggacaggtcagcgtggagatcgagtgggagctgcagaaggagaacagcaaacgctggaaccccgagatccagtacacttccaactacaacaaatctgttaatgtggactttactgtggacactaatggtgtgtattcagagcctcgccccattggcaccagatacctgactcgtaatctgtaa

SEQ ID NO: 4441 - DNA, 2208 bp, Artificial Sequence
  source: /note="Description of Artificial Sequence: Synthetic polynucleotide"
atggctgccgatggttatcttccagattggctcgaggacactctctctgaaggaataagacagtggtggaagctcaaacctggcccaccaccaccaaagcccgcagagcggcatcaggacgacagcaggggtcttgtgcttcctgggtacaagtacctcggacccttcaacggactcgacaaaggagagccggtcaacgaggcagacgctgcggccctcgagcacgacaaggcctacgaccggcagctcgacagcggagacaacccgtacctcaagtacaaccacgccgacgcggagtttcaggagcgtcttaaagaagatacgtcttttgggggcaacctcggacgagcagtcttccaggcgaaaaagagggttcttgaacctctgggcctggttgaggaacctgttaagacggctccgggaaaaaagaggccggtagagcactctcctgcggagccagactcctcctcgggaaccggaaaagcgggccagcagcctgcaagaaagagattgaatttcggtcagactggagacgcagactccgtacctgacccccagcctctcggacagccaccagcagcccccacaagtttgggatctactacaatggctacaggcagtggcgcaccaatggcagacaataacgagggtgccgatggagtgggtaattcctcaggaaattggcattgcgattcccaatggctgggcgacagagtcatcaccaccagcacccgaacctgggccctgcccacctacaacaaccacctctacaagcaaatctccagccaatcaggagcatcgaacgacaaccactactttggctacagcaccccttgggggtattttgacttcaacagattccactgtcacttctccccacgtgactggcaaagactcatcaacaacaactggggattccgacccaagagactcaacttcaagctctttaacattcaagtcaaagaggtcacgcagaatgacggtacgacgacgattgccaataaccttaccagcacggttcaggtgtttactgactcggagtaccagctcccgtacgtcctcggctcggcgcatcaaggatgcctcccgccgtttccagcggacgtcttcatggtcccacagtatggatacctcaccccgaacaacgggagtcaggcggtaggacgctcttccttttactgcctggagtactttccttctcagatgctgcgtaccggaaacaactttaccttcagctacacctttgaggacgtgcctttccacagcagctacgctcacagccagagtttggaccggctgatgaatcctctgatcgaccagtatctgtattatctgaacaggacacaatcaaatagtggaactcttcagcagtctaggctactgtttagccaagctggacccaccagcatgtctcttcaagctaaaaactggctgcctggaccttgctacagacagcagcgtctgtcaaagcaggcaaacgacaacaacaacagcaactttccctggactgcggctacaaagtatcatctaaatggtcgggactcgttggttaatccaggaccagctatggccagccacaaagacgatgaagaaaagtttttccccatgcatggaaccctgatatttggtaaacaaggaacaaatgctaacgacgcggatttggaacatgtcatgattacagatgaagaagaaatcaggaccaccaatcccgtggctacagagcagtacggaaacgtgtcaaataatttgcaaaactcaaatactggtccaactacagaaaatgtcaatcaccagggagcgttacctggtatggtgtggcaggatcgagacgtgtacctgcagggacccatttgggccaagattcctcacaccgacggacactttcacccttctccactgatgggaggttttggactcaaacacccgcctcctcaaatcatgatcaaaaacactcctgttccagccaatcctcctacaaacttcagcgcggcaaagtttgcttccttcatcacacagtattccacgggacaggtcagcgtggagatcgagtgggagctgcagaaggagaacagcaaacgctggaaccccgagatccagtacacttccaactacaacaaatctgttaatgtggactttactgtggacactaatggtgtgtattcagagcctcgccccattggcaccagatacctgactcgtaatctgtaa

SEQ ID NO: 4442 - DNA, 2208 bp, Artificial Sequence
  source: /note="Description of Artificial Sequence: Synthetic polynucleotide"
atggctgccgatggttatcttccagattggctcgaggacactctctctgaaggaataagacagtggtggaagctcaaacctggcccaccaccaccaaagcccgcagagcggcatcaggacgacagcaggggtcttgtgcttcctgggtacaagtacctcggacccttcaacggactcgacaaaggagagccggtcaacgaggcagacgctgcggccctcgagcacgacaaggcctacgaccggcagctcgacagcggagacaacccgtacctcaagtacaaccacgccgacgcggagtttcaggagcgtcttaaagaagatacgtcttttgggggcaacctcggacgagcagccttccaggcgaaaaagagggttcttgaacctctgggcctggttgaggaacctgttaagacggctccgggaaaaaagaggccggtagagcactctcctgcggagccagactcctcctcgggaaccggaaaagcgggccagcagcctgcaagaaagagattgaatttcggtcagactggagacgcagactccgtacctgacccccagcctctcggacagccaccagcagcccccacaagtttgggatctactacaatggctacaggcagtggcgcaccaatggcagacaataacgagggtgccgatggagtgggtaattcctcaggaaattggcattgcgattcccaatggctgggcgacagagtcatcaccaccagcacccgaacctgggccctgcccacctacaacaaccacctctacaagcaaatctccagccaatcaggagcatcgaacgacaaccactactttggctacagcaccccttgggggtattttgacttcaacagattccactgtcacttctccccacgtgactggcaaagactcatcaacaacaactggggattccgacccaagagactcaacttcaagctctttaacattcaagtcaaagaggtcacgcagaatgacggtacgacgacgattgccaataaccttaccagcacggttcaggtgtttactgactcggagtaccagctcccgtacgtcctcggctcggcgcatcaaggatgcctcccgccgtttccagcggacgtcttcatggtcccacagtatggatacctcaccctgaacaacgggagtcaggcggtaggacgctcttccttttactgcctggagtactttccttctcagatgctgcgtaccggaaacaactttaccttcagctacacctttgaggacgtgcctttccacagcagctacgctcacagccagagtttggaccggctgatgaatcctctgatcgaccagtatctgtattatctgaacaggacacaatcaaatagtggaactcttcagcagtctaggctactgtttagccaagctggacccaccagcatgtctcttcaagctaaaaactggctgcctggaccttgctacagacagcagcgtctgtcaaagcaggcaaacgacaacaacaacagcaactttccctggactgcggctacaaagtatcatctaaatggtcgggactcgttggttaatccaggaccagctatggccagccacaaagacgatgaagaaaagtttttccccatgcatggaaccctgatatttggtaaacaaggaacaaatgctaacgacgcggatttggaacatgtcatgattacagatgaagaagaaatcaggaccaccaatcccgtggctacagagcagtacggaaacgtgtcaaataatttgcaaaactcaaatactggtccaactacagaaaatgtcaatcaccagggagcgttacctggtatggtgtggcaggatcgagacgtgtacctgcagggacccatttgggccaagattcctcacaccgacggacactttcacccttctccactgatgggaggttttggactcaaacacccgcctcctcaaatcatgatcaaaaacactcctgttccagccaatcctcctacaaacttcagcgcggcaaagtttgcttccttcatcacacagtattccacgggacaggtcagcgtggagatcgagtgggagctgcagaaggagaacagcaaacgctggaaccccgagatccagtacacttccaactacaacaaatctgttaatgtggactttactgtggacactaatggtgtgtattcagagcctcgccccattggcaccagatacctgactcgtaatctgtaa

SEQ ID NO: 4443 - DNA, 2208 bp, Artificial Sequence
  source: /note="Description of Artificial Sequence: Synthetic polynucleotide"
atggctgccgatggttatcttccagattggctcgaggacactctctctgaaggaataagacagtggtggaagctcaaacctggcccaccaccaccaaagcccgcagagcggcatcaggacgacagcaggggtcttgtgcttcctgggtacaagtacctcggacccttcaacggactcgacaaaggagagccggtcaacgaggcagacgctgcggccctcgagcacgacaaggcctacgaccggcagctcgacagcggagacaacccgtacctcaagtacaaccacgccgacgcggagtttcaggagcgtcttaaagaagatacgtcttttgggggcaacctcggacgagcagtcttccaggcgaaaaagagggttcttgaacctctgggcctggttgaggaacctgttaagacggctccgggaaaaaagaggccggtagagcactctcctgcggagccagactcctcctcgggaaccggaaaagcgggccagcagcctgcaagaaagagattgaatttcggtcagactggagacgcagactccgtacctgacccccagcctctcggacagccaccagcagcccccacaagtttgggatctactacaatggctacaggcagtggcgcaccaatggcagacaataacgagggtgccgatggagtgggtaattcctcaggaaattggcattgcgattcccaatggctgggcgacagagtcatcaccaccagcacccgaacctgggccctgcccacctacaacaaccacctctacaagcaaatctccagccaatcaggagcatcgaacgacaaccactactttggctacagcaccccttgggggtattttgacttcaacagattccactgtcacttctccccacgtgactggcaaagactcatcaacaacaactggggattccgacccaagagactcaacttcaagctctttaacattcaagtcaaagaggtcacgcagaatgacggtacgacgacgattgccaataaccttaccagcacggttcaggtgtttactgactcggagtaccagctcccgtacgtcctcggctcggcgcatcaaggatgcctcccgccgtttccagcggacgtcttcatggtcccacagtatggatacctcaccctgaacaacgggagtcaggcggtaggacgctcttccttttactgcctggagtactttcctcctcagatgctgcgtaccggaaacaactttaccttcagctacacctttgaggacgtgcctttccacagcagctacgctcacagccagagtttggaccggctgatgaatcctctgatcgaccagtatctgtattatctgaacaggacacaatcaaatagtggaactcttcagcagtctaggctactgtttagccaagctggacccaccagcatgtctcttcaagctaaaaactggctgcctggaccttgctacagacagcagcgtctgtcaaagcaggcaaacgacaacaacaacagcaactttccctggactgcggctacaaagtatcatctaaatggtcgggactcgttggttaatccaggaccagctatggccagccacaaagacgatgaagaaaagtttttccccatgcatggaaccctgatatttggtaaacaaggaacaaatgctaacgacgcggatttggaacatgtcatgattacagatgaagaagaaatcaggaccaccaatcccgtggctacagagcagtacggaaacgtgtcaaataatttgcaaaactcaaatactggtccaactacagaaaatgtcaatcaccagggagcgttacctggtatggtgtggcaggatcgagacgtgtacctgcagggacccatttgggccaagattcctcacaccgacggacactttcacccttctccactgatgggaggttttggactcaaacacccgcctcctcaaatcatgatcaaaaacactcctgttccagccaatcctcctacaaacttcagcgcggcaaagtttgcttccttcatcacacagtattccacgggacaggtcagcgtggagatcgagtgggagctgcagaaggagaacagcaaacgctggaaccccgagatccagtacacttccaactacaacaaatctgttaatgtggactttactgtggacactaatggtgtgtattcagagcctcgccccattggcaccagatacctgactcgtaatctgtaa

SEQ ID NO: 4444 - DNA, 2208 bp, Artificial Sequence
  source: /note="Description of Artificial Sequence: Synthetic polynucleotide"
atggctgccgatggttatcttccagattggctcgaggacactctccctgaaggaataagacagtggtggaagctcaaacctggcccaccaccaccaaagcccgcagagcggcatcaggacgacagcaggggtcttgtgcttcctgggtacaagtacctcggacccttcaacggactcgacaaaggagagccggtcaacgaggcagacgctgcggccctcgagcacgacaaggcctacgaccggcagctcgacagcggagacaacccgtacctcaagtacaaccacgccgacgcggagtttcaggagcgtcttaaagaagatacgtcttttgggggcaacctcggacgagcagtcttccaggcgaaaaagagggttcttgaacctctgggcctggttgaggaacctgttaagacggctccgggaaaaaagaggccggtagagcactctcctgcggagccagactcctcctcgggaaccggaaaagcgggccagcagcctgcaagaaagagattgaatttcggtcagactggagacgcagactccgtacctgacccccagcctctcggacagccaccagcagcccccacaagtttgggatctactacaatggctacaggcagtggcgcaccaatggcagacaataacgagggtgccgatggagtgggtaattcctcaggaaattggcattgcgattcccaatggctgggcgacagagtcatcaccaccagcacccgaacctgggccctgcccacctacaacaaccacctctacaagcaaatctccagccaatcaggagcatcgaacgacaaccactactttggctacagcaccccttgggggtattttgacttcaacagattccactgtcacttctccccacgtgactggcaaagactcatcaacaacaactggggattccgacccaagagactcaacttcaagctctttaacattcaagtcaaagaggtcacgcagaatgacggtacgacgacgattgccaataaccttaccagcacggttcaggtgtttactgactcggagtaccagctcccgtacgtcctcggctcggcgcatcaaggatgcctcccgccgtttccagcggacgtcttcatggtcccacagtatggatacctcaccctgaacaacgggagtcaggcggtaggacgctcttccttttactgcctggagtactttccttctcagatgctgcgtaccggaaacaactttaccttcagctacacctttgaggacgtgcctttccacagcagctacgctcacagccagagtttggaccggctgatgaatcctctgatcgaccagtatctgtattatctgaacaggacacaatcaaatagtggaactcttcagcagtctaggctactgtttagccaagctggacccaccagcatgtctcttcaagctaaaaactggctgcctggaccttgctacagacagcagcgtctgtcaaagcaggcaaacgacaacaacaacagcaactttccctggactgcggctacaaagtatcatctaaatggtcgggactcgttggttaatccaggaccagctatggccagccacaaagacgatgaagaaaagtttttccccatgcatggaaccctgatatttggtaaacaaggaacaaatgctaacgacgcggatttggaacatgtcatgattacagatgaagaagaaatcaggaccaccaatcccgtggctacagagcagtacggaaacgtgtcaaataatttgcaaaactcaaatactggtccaactacagaaaatgtcaatcaccagggagcgttacctggtatggtgtggcaggatcgagacgtgtacctgcagggacccatttgggccaagattcctcacaccgacggacactttcacccttctccactgatgggaggttttggactcaaacacccgcctcctcaaatcatgatcaaaaacactcctgttccagccaatcctcctacaaacttcagcgcggcaaagtttgcttccttcatcacacagtattccacgggacaggtcagcgtggagatcgagtgggagctgcagaaggagaacagcaaacgctggaaccccgagatccagtacacttccaactacaacaaatctgttaatgtggactttactgtggacactaatggtgtgtattcagagcctcgccccattggcaccagatacctgactcgtaatctgtaa

SEQ ID NO: 4445 - DNA, 2208 bp, Artificial Sequence
  source: /note="Description of Artificial Sequence: Synthetic polynucleotide"
atggctgccgatggttatcttccagattggctcgaggacactctctctgaaggaataagacagtggtggaagctcaaacctggcccaccaccaccaaagcccgcagagcggcatcaggacgacagcaggggtcttgtgcttcctgggtacaagtacctcggacccttcaacggactcgacaaaggagagccggtcaacgaggcagacgctgcggccctcgagcacgacaaggcctacgaccggcagctcgacagcggagacaacccgtacctcaagtacaaccacgccgacgcggagtttcaggagcgtcttaaagaagatacgtcttttgggggcaacctcggacgagcagtcttccaggcgaaaaagagggttcttgaacctctgggcctggttgaggaacctgttaagacggctccgggaaaaaagaggccggtagagcactctcctgcggagccagactcctcctcgggaaccggaaaagcgggccagcagcctgcaagaaagagattgaatttcggtcagactggagacgcagactccgtacctgacccccagcctctcggacagccaccagcagcccccacaagtttgggatctactacaatggctacaggcagtggcgcaccaatggcagacaataacgagggtgccgatggagtgggtaattcctcaggaaattggcattgcgattcccaatggctgggcgacagagtcatcaccaccagcacccgaacctgggccctgcccacctacaacaaccacctctacaagcaaatctccagccaatcaggagcatcgaacgacaaccactactttggctacagcaccccttgggggtattttgacttcaacagattccactgtcacttctccccacgtgactggcaaagactcatcaacaacaactggggattccgacccaagagactcaacttcaagctctttaacattcaagtcaaagaggtcacgcagaatgacggtacgacgacgattgccaataaccttaccagcacggttcaggtgtttactgactcggagtaccagctcccgtacgtcctcggctcggcgcatcaaggatgcctcccgccgtttccagcggacgtcttcatggtcccacagtatggatacctcaccctgaacaacgggagtcaggcggtaggacgctcttccttttactgcctggagtactttccttctcagatgctgcgtaccggaaacaactttaccttcagctacacctttgaggacgtgcctttccacagcagctacgctcacagccagagtttggaccggctgatgaatcctctgatcgaccagtatctgtattatctgaacaggacacaatcaaatagtggaactcttcagcagtctaggctactgtttagccaagctggacccaccagcatgtctcttcaagctaaaaactggctgcctggaccttgctacagacggcagcgtctgtcaaagcaggcaaacgacaacaacaacagcaactttccctggactgcggctacaaagtatcatctaaatggtcgggactcgttggttaatccaggaccagctatggccagccacaaagacgatgaagaaaagtttttccccatgcatggaaccctgatatttggtaaacaaggaacaaatgctaacgacgcggatttggaacatgtcatgattacagatgaagaagaaatcaggaccaccaatcccgtggctacagagcagtacggaaacgtgtcaaataatttgcaaaactcaaatactggtccaactacagaaaatgtcaatcaccagggagcgttacctggtatggtgtggcaggatcgagacgtgtacctgcagggacccatttgggccaagattcctcacaccgacggacactttcacccttctccactgatgggaggttttggactcaaacacccgcctcctcaaatcatgatcaaaaacactcctgttccagccaatcctcctacaaacttcagcgcggcaaagtttgcttccttcatcacacagtattccacgggacaggtcagcgtggagatcgagtgggagctgcagaaggagaacagcaaacgctggaaccccgagatccagtacacttccaactacaacaaatctgttaatgtggactttactgtggacactaatggtgtgtattcagagcctcgccccattggcaccagatacctgactcgtaatctgtaa

SEQ ID NO: 4446 - DNA, 2208 bp, Artificial Sequence
  source: /note="Description of Artificial Sequence: Synthetic polynucleotide"
atggctgccgatggttatcttccagattggctcgaggacactctctctgaaggaataagacagtggtggaagctcaaacctggcccaccaccaccaaagcccgcagagcggcatcaggacgacagcaggggtcttgtgcttcctgggtacaagtacctcggacccttcaacggactcgacaaaggagagccggtcaacgaggcagacgctgcggccctcgagcacgacaaggcctacgaccggcagctcgacagcggagacaacccgtacctcaagtacaaccacgccgacgcggagtttcaggagcgtcttaaagaagatacgtcttttgggggcaacctcggacgagcagtcttccaggcgaaaaagagggttcttgaacctctgggcctggttgaggaacctgttaagacggctccgggaaaaaagaggccggtagagcactctcctgcggagccagactcctcctcgggaaccggaaaagcgggccagcagcctgcaagaaagagattgaatttcggtcagactggagacgcagactccgtacctgacccccagcctctcggacagccaccagcagcccccacaagtttgggatctactacaatggctacaggcagtggcgcaccaatggcagacaataacgagggtgccgatggagtgggtaattcctcaggaaattggcattgcgattcccaatggctgggcgacagagtcatcaccaccagcacccgaacctgggccctgcccacctacaacaaccacctctacaagcaaatctccagccaatcaggagcatcgaacgacaaccactactttggctacagcaccccttgggggtattttgacttcaacagattccactgtcacttctccccacgtgactggcaaagactcatcaacaacaactggggattccgacccaagagactcaacttcaagctctttaacattcaagtcaaagaggtcacgcagaatgacggtacgacgacgattgccaataaccttaccagcacggttcaggtgtttactgactcggagtaccagctcccgtacgtcctcggctcggcgcatcaaggatgcctcccgccgtttccagcggacgtcttcatggtcccacagtatggatacctcaccctgaacaacgggagtcaggcggtaggacgctcttccttttactgcctggagtaccttccttctcagatgctgcgtaccggaaacaactttaccttcagctacacctttgaggacgtgcctttccacagcagctacgctcacagccagagtttggaccggctgatgaatcctctgatcgaccagtatctgtattatctgaacaggacacaatcaaatagtggaactcttcagcagtctaggctactgtttagccaagctggacccaccagcatgtctcttcaagctaaaaactggctgcctggaccttgctacagacagcagcgtctgtcaaagcaggcaaacgacaacaacaacagcaactttccctggactgcggctacaaagtatcatctaaatggtcgggactcgttggttaatccaggaccagctatggccagccacaaagacgatgaagaaaagtttttccccatgcatggaaccctgatatttggtaaacaaggaacaaatgctaacgacgcggatttggaacatgtcatgattacagatgaagaagaaatcaggaccaccaatcccgtggctacagagcagtacggaaacgtgtcaaataatttgcaaaactcaaatactggtccaactacagaaaatgtcaatcaccagggagcgttacctggtatggtgtggcaggatcgagacgtgtacctgcagggacccatttgggccaagattcctcacaccgacggacactttcacccttctccactgatgggaggttttggactcaaacacccgcctcctcaaatcatgatcaaaaacactcctgttccagccaatcctcctacaaacttcagcgcggcaaagtttgcttccttcatcacacagtattccacgggacaggtcagcgtggagatcgagtgggagctgcagaaggagaacagcaaacgctggaaccccgagatccagtacacttccaactacaacaaatctgttaatgtggactttactgtggacactaatggtgtgtattcagagcctcgccccattggcaccagatacctgactcgtaatctgtaa

SEQ ID NO: 4447 - DNA, 2208 bp, Artificial Sequence
  source: /note="Description of Artificial Sequence: Synthetic polynucleotide"
atggctgccgatggttatcttccagattggctcgaggacactctctctgaaggaataagacagtggtggaagctcaaacctggcccaccaccaccaaagcccgcagagcggcatcaggacgacagcaggggtcttgtgcttcctgggtacaagtacctcggacccttcaacggactcgacaaaggagagccggtcaacgaggcagacgctgcggccctcgagcacgacaaggcctacgaccggcagctcgacagcggagacaacccgtacctcaagtacaaccacgccgacgcggagtttcaggagcgtcttaaagaagatacgtcttttgggggcaacctcggacgagcagtcttccaggcgaaaaagagggttcttgaacctctgggcctggttgaggaacctgttaagacggctccgggaaaaaagaggccggtagagcactctcctgcggagccagactcctcctcgggaaccggaaaagcgggccagcagcctgcaagaaagagattgaatttcggtcagactggagacgcagactccgtacctgacccccagcctctcggacagccaccagcagcccccacaagtttgggatctactacaatggctacaggcagtggcgcaccaatggcagacaataacgagggtgccgatggagtgggtaattcctcaggaaattggcattgcgattcccaatggctgggcgacagagtcatcaccaccagcacccgaacctgggccctgcccacctacaacaaccacctctacaagcaaatctccagccaatcaggagcatcgaacgacaaccactactttggctacagcaccccttgggggtattttgacttcaacagattccactgtcacttctccccacgtgactggcaaagactcatcaacaacaactggggattccgacccaagagactcaacttcaagctctttaacattcaagtcaaagaggtcacgcagaatgacggtacgacgacgattgccaataaccttaccagcacggttcaggtgtttactgactcggagtaccagctcccgtacgtcctcggctcggcgcatcaaggatgcctcccgccgtttccagcggacgtcttcatggtcccacagtatggatacctcaccctgaacaacgggagtcaggcggtaggacgctcttccttttactgcctggagtactttccttctcagatgctgcgtaccggaaacaactttaccttcagctacacctttgaggacgtgcctttccacagcagctacgctcacagccagagtttggaccggctgatgaatcctctgatcgaccagtatctgtattatctgaacaggacacaatcaaatagtggaactcttcagcagtctaggctactgtttagccaagctggacccaccagcatgtctcttcaagctaaaaactggctgcctggaccttgctacagacagcagcgtctgtcaaagcaggcaaacgacaacaacaacggcaactttccctggactgcggctacaaagtatcatctaaatggtcgggactcgttggttaatccaggaccagctatggccagccacaaagacgatgaagaaaagtttttccccatgcatggaaccctgatatttggtaaacaaggaacaaatgctaacgacgcggatttggaacatgtcatgattacagatgaagaagaaatcaggaccaccaatcccgtggctacagagcagtacggaaacgtgtcaaataatttgcaaaactcaaatactggtccaactacagaaaatgtcaatcaccagggagcgttacctggtatggtgtggcaggatcgagacgtgtacctgcagggacccatttgggccaagattcctcacaccgacggacactttcacccttctccactgatgggaggttttggactcaaacacccgcctcctcaaatcatgatcaaaaacactcctgttccagccaatcctcctacaaacttcagcgcggcaaagtttgcttccttcatcacacagtattccacgggacaggtcagcgtggagatcgagtgggagctgcagaaggagaacagcaaacgctggaaccccgagatccagtacacttccaactacaacaaatctgttaatgtggactttactgtggacactaatggtgtgtattcagagcctcgccccattggcaccagatacctgactcgtaatctgtaa

SEQ ID NO: 4448 - DNA, 2208 bp, Artificial Sequence
  source: /note="Description of Artificial Sequence: Synthetic polynucleotide"
atggctgccgatggttatcttccagattggctcgaggacactctctctgaaggaataagacagtggtggaagctcaaacctggcccaccaccaccaaagcccgcagagcggcatcaggacgacagcaggggtcttgtgcttcctgggtacaagtacctcggacccttcaacggactcgacaaaggagagccggtcaacgaggcagacgctgcggccctcgagcacgacaaggcctacgaccggcagttcgacagcggagacaacccgtacctcaagtacaaccacgccgacgcggagtttcaggagcgtcttaaagaagatacgtcttttgggggcaacctcggacgagcagtcttccaggcgaaaaagagggttcttgaacctctgggcctggttgaggaacctgttaagacggctccgggaaaaaagaggccggtagagcactctcctgcggagccagactcctcctcgggaaccggaaaagcgggccagcagcctgcaagaaagagattgaatttcggtcagactggagacgcagactccgtacctgacccccagcctctcggacagccaccagcagcccccacaagtttgggatctactacaatggctacaggcagtggcgcaccaatggcagacaataacgagggtgccgatggagtgggtaattcctcaggaaattggcattgcgattcccaatggctgggcgacagagtcatcaccaccagcacccgaacctgggccctgcccacctacaacaaccacctctacaagcaaatctccagccaatcaggagcatcgaacgacaaccactactttggctacagcaccccttgggggtattttgacttcaacagattccactgtcacttctccccacgtgactggcaaagactcatcaacaacaactggggattccgacccaagagactcaacttcaagctctttaacattcaagtcaaagaggtcacgcagaatgacggtacgacgacgattgccaataaccttaccagcacggttcaggtgtttactgactcggagtaccagctcccgtacgtcctcggctcggcgcatcaaggatgcctcccgccgtttccagcggacgtcttcatggtcccacagtatggatacctcaccctgaacaacgggagtcaggcggtaggacgctcttccttttactgcctggagtactttccttctcagatgctgcgtaccggaaacaactttaccttcagctacacctttgaggacgtgcctttccacagcagctacgctcacagccagagtttggaccggctgatgaatcctctgatcgaccagtatctgtattatctgaacaggacacaatcaaatagtggaactcttcagcagtctaggctactgtttagccaagctggacccaccagcatgtctcttcaagctaaaaactggctgcctggaccttgctacagacagcagcgtctgtcaaagcaggcaaacgacaacaacaacagcaactttccctggactgcggctacaaagtatcatctaaatggtcgggactcgttggttaatccaggaccagctatggccagccacaaagacgatgaagaaaagtttttccccatgcatggaaccctgatatttggtaaacaaggaacaaatgctaacgacgcggatttggaacatgtcatgattacagatgaagaagaaatcaggaccaccaatcccgtggctacagagcagtacggaaacgtgtcaaataatttgcaaaactcaaatactggtccaactacagaaaatgtcaatcaccagggagcgttacctggtatggtgtggcaggatcgagacgtgtacctgcagggacccatttgggccaagattcctcacaccgacggacactttcacccttctccactgatgggaggttttggactcaaacacccgcctcctcaaatcatgatcaaaaacactcctgttccagccaatcctcctacaaacttcagcgcggcaaagtttgcttccttcatcacacagtattccacgggacaggtcagcgtggagatcgagtgggagctgcagaaggagaacagcaaacgctggaaccccgagatccagtacacttccaactacaacaaatctgttaatgtggactttactgtggacactaatggtgtgtattcagagcctcgccccattggcaccagatacctgactcgtaatctgtaa

SEQ ID NO: 4449 - DNA, 2208 bp, Artificial Sequence
  source: /note="Description of Artificial Sequence: Synthetic polynucleotide"
atggctgccgatggttatcttccagattggctcgaggacactctctctgaaggaataagacagtggtggaagctcaaacctggcccaccaccaccaaagcccgcagagcggcatcaggacgacagcaggggtcttgtgcttcctgggtacaagtacctcggacccttcaacggactcgacaaaggagagccggtcaacgaggcagacgctgcggccctcgagcacgacaaggcctacgaccggcagctcgacagcggagacaacccgtacctcaagtacaaccacgccgacgcggagtttcaggagcgtcttaaagaagatacgtcttttgggggcaacctcggacgagcagtcttccaggcgaaaaagagggttcttgaacctctgggcctggttgaggaacctgttaagacggctccgggaaaaaagaggccggtagagcactctcctgcggagccagactcctcctcgggaaccggaaaagcgggccagcagcctgcaagaaagagattgaatttcggtcagactggagacgcagactccgtacctgacccccagcctctcggacagccaccagcagcccccacaagtttgggatctactacaatggctacaggcagtggcgcaccaatggcagacaataacgagggtgccgatggagtgggtaattcctcaggaaattggcattgcgattcccaatggctgggcgacagagtcatcaccaccagcacccgaacctgggccctgcccacctacaacaaccacctctacaagcaaatctccagccaatcaggagcatcgaacgacaaccactactttggctacagcaccccttgggggtattttgacttcaacagattccactgtcacttctccccacgtgaccggcaaagactcatcaacaacaactggggattccgacccaagagactcaacttcaagctctttaacattcaagtcaaagaggtcacgcagaatgacggtacgacgacgattgccaataaccttaccagcacggttcaggtgtttactgactcggagtaccagctcccgtacgtcctcggctcggcgcatcaaggatgcctcccgccgtttccagcggacgtcttcatggtcccacagtatggatacctcaccctgaacaacgggagtcaggcggtaggacgctcttccttttactgcctggagtactttccttctcagatgctgcgtaccggaaacaactttaccttcagctacacctttgaggacgtgcctttccacagcagctacgctcacagccagagtttggaccggctgatgaatcctctgatcgaccagtatctgtattatctgaacaggacacaatcaaatagtggaactcttcagcagtctaggctactgtttagccaagctggacccaccagcatgtctcttcaagctaaaaactggctgcctggaccttgctacagacagcagcgtctgtcaaagcaggcaaacgacaacaacaacagcaactttccctggactgcggctacaaagtatcatctaaatggtcgggactcgttggttaatccaggaccagctatggccagccacaaagacgatgaagaaaagtttttccccatgcatggaaccctgatatttggtaaacaaggaacaaatgctaacgacgcggatttggaacatgtcatgattacagatgaagaagaaatcaggaccaccaatcccgtggctacagagcagtacggaaacgtgtcaaataatttgcaaaactcaaatactggtccaactacagaaaatgtcaatcaccagggagcgttacctggtatggtgtggcaggatcgagacgtgtacctgcagggacccatttgggccaagattcctcacaccgacggacactttcacccttctccactgatgggaggttttggactcaaacacccgcctcctcaaatcatgatcaaaaacactcctgttccagccaatcctcctacaaacttcagcgcggcaaagtttgcttccttcatcacacagtattccacgggacaggtcagcgtggagatcgagtgggagctgcagaaggagaacagcaaacgctggaaccccgagatccagtacacttccaactacaacaaatctgttaatgtggactttactgtggacactaatggtgtgtattcagagcctcgccccattggcaccagatacctgactcgtaatctgtaa

SEQ ID NO: 4450 - DNA, 2208 bp, Artificial Sequence
  source: /note="Description of Artificial Sequence: Synthetic polynucleotide"
atggctgccgatggttatcttccagattggctcgaggacactctctctgaaggaataagacagtggtggaagctcaaacctggcccaccaccaccaaagcccgcagagcggcatcaggacgacagcaggggtcttgtgcttcctgggtacaagtacctcggacccttcaacggactcgacaaaggagagccggtcaacgaggcagacgctgcggccctcgagcacgacaaggcctacgaccggcagctcgacagcggagacaacccgtacctcaagtacaaccacgccgacgcggagtttcaggagcgtcttaaagaagatacgtcttttgggggcaacctcggacgagcagtcttccaggcgaaaaagagggttcttgaacctctgggcctggttgaggaacctgttaagacggctccgggaaaaaagaggccggtagagcactctcctgcggagccagactcctcctcgggaaccggaaaagcgggccagcagcctgcaagaaagagattgaatttcggtcagactggagacgcagactccgtacctgacccccagcctctcggacagccaccagcagcccccacaagtttgggatctactacaatggctacaggcagtggcgcaccaatggcagacaataacgagggtgccgatggagtgggtaattcctcaggaaattggcattgcgattcccaatggctgggcgacagagtcatcaccaccagcacccgaacctgggccctgcccgcctacaacaaccacctctacaagcaaatctccagccaatcaggagcatcgaacgacaaccactactttggctacagcaccccttgggggtattttgacttcaacagattccactgtcacttctccccacgtgactggcaaagactcatcaacaacaactggggattccgacccaagagactcaacttcaagctctttaacattcaagtcaaagaggtcacgcagaatgacggtacgacgacgattgccaataaccttaccagcacggttcaggtgtttactgactcggagtaccagctcccgtacgtcctcggctcggcgcatcaaggatgcctcccgccgtttccagcggacgtcttcatggtcccacagtatggatacctcaccctgaacaacgggagtcaggcggtaggacgctcttccttttactgcctggagtactttccttctcagatgctgcgtaccggaaacaactttaccttcagctacacctttgaggacgtgcctttccacagcagctacgctcacagccagagtttggaccggctgatgaatcctctgatcgaccagtatctgtattatctgaacaggacacaatcaaatagtggaactcttcagcagtctaggctactgtttagccaagctggacccaccagcatgtctcttcaagctaaaaactggctgcctggaccttgctacagacagcagcgtctgtcaaagcaggcaaacgacaacaacaacagcaactttccctggactgcggctacaaagtatcatctaaatggtcgggactcgttggttaatccaggaccagctatggccagccacaaagacgatgaagaaaagtttttccccatgcatggaaccctgatatttggtaaacaaggaacaaatgctaacgacgcggatttggaacatgtcatgattacagatgaagaagaaatcaggaccaccaatcccgtggctacagagcagtacggaaacgtgtcaaataatttgcaaaactcaaatactggtccaactacagaaaatgtcaatcaccagggagcgttacctggtatggtgtggcaggatcgagacgtgtacctgcagggacccatttgggccaagattcctcacaccgacggacactttcacccttctccactgatgggaggttttggactcaaacacccgcctcctcaaatcatgatcaaaaacactcctgttccagccaatcctcctacaaacttcagcgcggcaaagtttgcttccttcatcacacagtattccacgggacaggtcagcgtggagatcgagtgggagctgcagaaggagaacagcaaacgctggaaccccgagatccagtacacttccaactacaacaaatctgttaatgtggactttactgtggacactaatggtgtgtattcagagcctcgccccattggcaccagatacctgactcgtaatctgtaa

SEQ ID NO: 4451 - DNA, 2205 bp, Artificial Sequence
  source: /note="Description of Artificial Sequence: Synthetic polynucleotide"
atggctgccgatggttatcttccagattggctcgaggacactctctctgaaggaataagacagtggtggaagctcaaacctggcccaccaccaccaaagcccgcagagcggcatcaggacgacagcaggggtcttgtgcttcctgggtacaagtacctcggacccttcaacggactcgacaaaggagagccggtcaacgaggcagacgctgcggccctcgagcacgacaaggcctacgaccggcagctcgacagcggagacaacccgtacctcaagtacaaccacgccgacgcggagtttcaggagcgtcttaaagaagatacgtcttttgggggcaacctcggacgagcagtcttccaggcgaaaaagagggttcttgaacctctgggcctggttgaggaacctgttaagacggctccgggaaaaaagaggccggtagagcactctcctgcggagccagactcctcctcgggaaccggaaaagcgggccagcagcctgcaagaaagagattgaatttcggtcagactggagacgcagactccgtacctgacccccagcctctcggacagccaccagcagcccccacaagtttgggatctactacaatggctacaggcagtggcgcaccaatggcagacaataacgagggtgccgatggagtgggtaattcctcaggaaattggcattgcgattcccaatggctgggcgacagagtcatcaccaccagcacccgaacctgggccctgcccacctacaacaaccacctctacaagcaaatctccagccaatcaggagcatcgaacgacaaccactactttggctacagcaccccttgggggtattttgacttcaacagattccactgtcacttctccccacgtgactggcaaagactcatcaacaacaactggggattccgacccaagagactcaacttcaagctctttaacattcaagtcaaagaggtcacgcagaatgacggtacgacgacgattgccaataaccttaccagcacggttcaggtgtttactgactcggagtaccagctcccgtacgtcctcggctcggcgcatcaaggatgcctcccgccgtttccagcggacgccttcatggtcccacagtatggatacctcaccctgaacaacgggagtcaggcggtaggacgctcttccttttactgcctggagtactttccttctcagatgctgcgtaccggaaacaactttaccttcagctacacctttgaggacgtgcctttccacagcagctacgctcacagccagagtttggaccggctgatgaatcctctgatcgaccagtatctgtattatctgaacaggacacaatcaaatagtggaactcttcagcagtctaggctactgtttagccaagctggacccaccagcatgtctcttcaagctaaaaactggctgcctggaccttgctacagacagcagcgtctgtcaaagcaggcaaacgacaacaacagcaactttccctggactgcggctacaaagtatcatctaaatggtcgggactcgttggttaatccaggaccagctatggccagccacaaagacgatgaagaaaagtttttccccatgcatggaaccctgatatttggtaaacaaggaacaaatgctaacgacgcggatttggaacatgtcatgattacagatgaagaagaaatcaggaccaccaatcccgtggctacagagcagtacggaaacgtgtcaaataatttgcaaaactcaaatactggtccaactacagaaaatgtcaatcaccagggagcgttacctggtatggtgtggcaggatcgagacgtgtacctgcagggacccatttgggccaagattcctcacaccgacggacactttcacccttctccactgatgggaggttttggactcaaacacccgcctcctcaaatcatgatcaaaaacactcctgttccagccaatcctcctacaaacttcagcgcggcaaagtttgcttccttcatcacacagtattccacgggacaggtcagcgtggagatcgagtgggagctgcagaaggagaacagcaaacgctggaaccccgagatccagtacacttccaactacaacaaatctgttaatgtggactttactgtggacactaatggtgtgtattcagagcctcgccccattggcaccagatacctgactcgtaatctgtaa

SEQ ID NO: 4452 - DNA, 2208 bp, Artificial Sequence
  source: /note="Description of Artificial Sequence: Synthetic polynucleotide"
atggctgccgatggttatcttccagattggctcgaggacactctctctgaaggaataagacagtggtggaagctcaaacctggcccaccaccaccaaagcccgcagagcggcatcaggacgacagcaggggtcttgtgcttcctgggtacaagtacctcggacccttcaacggactcgacaaaggagagccggtcaacgaggcagacgctgcggccctcgagcacgacaaggcctacgaccggcagctcgacagcggagacaacccgtacctcaagtacaaccacgccgacgcggagtttcaggagcgtcttaaagaagatacgtcttttgggggcaacctcggacgagcagtcttccaggcgaaaaagagggttcttgaacctctgggcctggttgaggaacctgttaagacggctccgggaaaaaagaggccggtagagcactctcctgcggagccagactcctcctcgggaaccggaaaagcgggccagcagcctgcaagaaagagattgaatttcggtcagactggagacgcagactccgtacctgacccccagcctctcggacagccaccagcagcccccacaagtttgggatctactacaatggctacaggcagtggcgcaccaatggcagacaataacgagggtgccgatggagtgggtaattcctcaggaaattggcattgcgattcccaatggctgggcgacagagtcatcaccaccagcacccgaacctgggccctgcccacctacaacaaccacctctacaagcaaatctccagccaatcaggagcatcgaacgacaaccactactttggctacagcaccccttgggggtattttgacttcaacagattccactgtcacttctccccacgtggctggcaaagactcatcaacaacaactggggattccgacccaagagactcaacttcaagctctttaacattcaagtcaaagaggtcacgcagaatgacggtacgacgacgattgccaataaccttaccagcacggttcaggtgtttactgactcggagtaccagctcccgtacgtcctcggctcggcgcatcaaggatgcctcccgccgtttccagcggacgtcttcatggtcccacagtatggatacctcaccctgaacaacgggagtcaggcggtaggacgctcttccttttactgcctggagtactttccttctcagatgctgcgtaccggaaacaactttaccttcagctacacctttgaggacgtgcctttccacagcagctacgctcacagccagagtttggaccggctgatgaatcctctgatcgaccagtatctgtattatctgaacaggacacaatcaaatagtggaactcttcagcagtctaggctactgtttagccaagctggacccaccagcatgtctcttcaagctaaaaactggctgcctggaccttgctacagacagcagcgtctgtcaaagcaggcaaacgacaacaacaacagcaactttccctggactgcggctacaaagtatcatctaaatggtcgggactcgttggttaatccaggaccagctatggccagccacaaagacgatgaagaaaagtttttccccatgcatggaaccctgatatttggtaaacaaggaacaaatgctaacgacgcggatttggaacatgtcatgattacagatgaagaagaaatcaggaccaccaatcccgtggctacagagcagtacggaaacgtgtcaaataatttgcaaaactcaaatactggtccaactacagaaaatgtcaatcaccagggagcgttacctggtatggtgtggcaggatcgagacgtgtacctgcagggacccatttgggccaagattcctcacaccgacggacactttcacccttctccactgatgggaggttttggactcaaacacccgcctcctcaaatcatgatcaaaaacactcctgttccagccaatcctcctacaaacttcagcgcggcaaagtttgcttccttcatcacacagtattccacgggacaggtcagcgtggagatcgagtgggagctgcagaaggagaacagcaaacgctggaaccccgagatccagtacacttccaactacaacaaatctgttaatgtggactttactgtggacactaatggtgtgtattcagagcctcgccccattggcaccagatacctgactcgtaatctgtaa

SEQ ID NO: 4453 - DNA, 2208 bp, Artificial Sequence
  source: /note="Description of Artificial Sequence: Synthetic polynucleotide"
atggctgccgatggttatcttccagattggctcgaggacactctctctgaaggaataagacagtggtggaagctcaaacctggcccaccaccaccaaagcccgcagagcggcatcaggacgacagcaggggtcttgtgcttcctgggtacaagtacctcggacccttcaacggactcgacaaaggagagccggtcaacgaggcagacgctgcggccctcgagcacgacaaggcctacgaccggcagctcgacagcggagacaacccgtacctcaagtacaaccacgccgacgcggagtttcaggagcgtcttaaagaagatacgtcttttgggggcaacctcggacgagcagtcttccaggcgaaaaagagggttcttgaacctctgggcctggttgaggaacctgttaagacggctccgggaaaaaagaggccggtagagcactctcctgcggagccagactcctcctcgggaaccggaaaagcgggccagcagcctgcaagaaagagattgaatttcggtcagactggagacgcagactccgtacctgacccccagcctctcggacagccaccagcagcccccacaagtttgggatctactacaatggctacaggcagtggcgcaccaatggcagacaataacgagggtgccgatggagtgggtaattcctcaggaaattggcattgcgattcccaatggctgggcgacagagtcatcaccaccagcacccgaacctgggccctgcccacctacaacaaccacctctacaagcaaatctccagccaatcaggagcatcgaacgacaaccactactttggctacagcaccccttgggggtattttgacttcaacagattccactgtcacttctccccacgtgactggcaaagactcatcaacaacaactggggattccgacccaagagactcaacttcaagctctttaacattcaagtcaaagaggtcacgcagaatgacggtacgacgacgattgccaataaccttaccagcacggttcaggtgtttactgactcggagtaccagctcccgtacgtcctcggctcggcgcatcaaggatgcctcccgccgtttccagcggacgtcttcatggtcccacagtatggatacctcaccctgaacaacgggagtcaggcggtaggacgctcttccttttactgcctggagtactttccttctcagatgctgcgtaccggaaacaactttaccttcagctacacctttgaggacgtgcctttccacagcagctacgctcacagccagagtttggaccggctgatgaatcctctgatcgaccagtatctgtattatctgaacgggacacaatcaaatagtggaactcttcagcagtctaggctactgtttagccaagctggacccaccagcatgtctcttcaagctaaaaactggctgcctggaccttgctacagacagcagcgtctgtcaaagcaggcaaacgacaacaacaacagcaactttccctggactgcggctacaaagtatcatctaaatggtcgggactcgttggttaatccaggaccagctatggccagccacaaagacgatgaagaaaagtttttccccatgcatggaaccctgatatttggtaaacaaggaacaaatgctaacgacgcggatttggaacatgtcatgattacagatgaagaagaaatcaggaccaccaatcccgtggctacagagcagtacggaaacgtgtcaaataatttgcaaaactcaaatactggtccaactacagaaaatgtcaatcaccagggagcgttacctggtatggtgtggcaggatcgagacgtgtacctgcagggacccatttgggccaagattcctcacaccgacggacactttcacccttctccactgatgggaggttttggactcaaacacccgcctcctcaaatcatgatcaaaaacactcctgttccagccaatcctcctacaaacttcagcgcggcaaagtttgcttccttcatcacacagtattccacgggacaggtcagcgtggagatcgagtgggagctgcagaaggagaacagcaaacgctggaaccccgagatccagtacacttccaactacaacaaatctgttaatgtggactttactgtggacactaatggtgtgtattcagagcctcgccccattggcaccagatacctgactcgtaatctgtaa

SEQ ID NO: 4454 - DNA, 2208 bp, Artificial Sequence
  source: /note="Description of Artificial Sequence: Synthetic polynucleotide"
atggctgccgatggttatcttccagattggctcgaggacactctctctgaaggaataagacagtggtggaagctcaaacctggcccaccaccaccaaagcccgcagagcggcatcaggacgacagcaggggtcttgtgcttcctgggtacaagtacctcggacccttcaacggactcgacaaaggagagccggtcaacgaggcagacgctgcggccctcgagcacgacaaggcctacgaccggcagctcgacagcggagacaacccgtacctcaagtacaaccacgccgacgcggagtttcaggagcgtcttaaagaagatacgtcttttgggggcaacctcggacgagcagtcttccaggcgaaaaagagggttcttgaacctctgggcctggttgaggaacctgttaagacggctccgggaaaaaagaggccggtagagcactctcctgcggagccagactcctcctcgggaaccggaaaagcgggccagcagcctgcaagaaagagattgaatttcggtcagactggagacgcagactccgtacctgacccccagcctctcggacagccaccagcagcccccacaagtttgggatctactacaatggctacaggcagtggcgcaccaatggcagacaataacgagggtgccgatggagtgggtaattcctcaggaaattggcattgcgattcccaatggctgggcgacagagtcatcaccaccagcacccgaacctgggccctgcccacctacaacaaccacctctacaagcaaatctccagccaatcaggagcatcgaacgacaaccactactttggctacagcaccccttgggggtattttgacttcaacagattccactgtcacctctccccacgtgactggcaaagactcatcaacaacaactggggattccgacccaagagactcaacttcaagctctttaacattcaagtcaaagaggtcacgcagaatgacggtacgacgacgattgccaataaccttaccagcacggttcaggtgtttactgactcggagtaccagctcccgtacgtcctcggctcggcgcatcaaggatgcctcccgccgtttccagcggacgtcttcatggtcccacagtatggatacctcaccctgaacaacgggagtcaggcggtaggacgctcttccttttactgcctggagtactttccttctcagatgctgcgtaccggaaacaactttaccttcagctacacctttgaggacgtgcctttccacagcagctacgctcacagccagagtttggaccggctgatgaatcctctgatcgaccagtatctgtattatctgaacaggacacaatcaaatagtggaactcttcagcagtctaggctactgtttagccaagctggacccaccagcatgtctcttcaagctaaaaactggctgcctggaccttgctacagacagcagcgtctgtcaaagcaggcaaacgacaacaacaacagcaactttccctggactgcggctacaaagtatcatctaaatggtcgggactcgttggttaatccaggaccagctatggccagccacaaagacgatgaagaaaagtttttccccatgcatggaaccctgatatttggtaaacaaggaacaaatgctaacgacgcggatttggaacatgtcatgattacagatgaagaagaaatcaggaccaccaatcccgtggctacagagcagtacggaaacgtgtcaaataatttgcaaaactcaaatactggtccaactacagaaaatgtcaatcaccagggagcgttacctggtatggtgtggcaggatcgagacgtgtacctgcagggacccatttgggccaagattcctcacaccgacggacactttcacccttctccactgatgggaggttttggactcaaacacccgcctcctcaaatcatgatcaaaaacactcctgttccagccaatcctcctacaaacttcagcgcggcaaagtttgcttccttcatcacacagtattccacgggacaggtcagcgtggagatcgagtgggagctgcagaaggagaacagcaaacgctggaaccccgagatccagtacacttccaactacaacaaatctgttaatgtggactttactgtggacactaatggtgtgtattcagagcctcgccccattggcaccagatacctgactcgtaatctgtaa

SEQ ID NO: 4455 - DNA, 2208 bp, Artificial Sequence
  source: /note="Description of Artificial Sequence: Synthetic polynucleotide"
atggctgccgatggttatcttccagattggctcgaggacactctctctgaaggaataagacagtggtggaagctcaaacctggcccaccaccaccaaagcccgcagagcggcatcaggacgacagcaggggtcttgtgcttcctgggtacaagtacctcggacccttcaacggactcgacaaaggagagccggtcaacgaggcagacgctgcggccctcgggcacgacaaggcctacgaccggcagctcgacagcggagacaacccgtacctcaagtacaaccacgccgacgcggagtttcaggagcgtcttaaagaagatacgtcttttgggggcaacctcggacgagcagtcttccaggcgaaaaagagggttcttgaacctctgggcctggttgaggaacctgttaagacggctccgggaaaaaagaggccggtagagcactctcctgcggagccagactcctcctcgggaaccggaaaagcgggccagcagcctgcaagaaagagattgaatttcggtcagactggagacgcagactccgtacctgacccccagcctctcggacagccaccagcagcccccacaagtttgggatctactacaatggctacaggcagtggcgcaccaatggcagacaataacgagggtgccgatggagtgggtaattcctcaggaaattggcattgcgattcccaatggctgggcgacagagtcatcaccaccagcacccgaacctgggccctgcccacctacaacaaccacctctacaagcaaatctccagccaatcaggagcatcgaacgacgaccactactttggctacagcaccccttgggggtattttgacttcaacagattccactgtcacttctccccacgtgactggcaaagactcatcaacaacaactggggattccgacccaagagactcaacttcaagctctttaacattcaagtcaaagaggtcacgcagaatgacggtacgacgacgattgccaataaccttaccagcacggttcaggtgtttactgactcggagtaccagctcccgtacgtcctcggctcggcgcatcaaggatgcctcccgccgtttccagcggacgtcttcatggtcccacagtatggatacctcaccctgaacaacgggagtcaggcggtaggacgctcttccttttactgcctggagtactttccttctcagatgctgcgtaccggaaacaactttaccttcagctacacctttgaggacgtgcctttccacagcagctacgctcacagccagagtttggaccggctgatgaatcctctgatcgaccagtatctgtattatctgaacaggacacaatcaaatagtggaactcttcagcagtctaggctactgtttagccaagctggacccaccagcatgtctcttcaagctaaaaactggctgcctggaccttgctacagacagcagcgtctgtcaaagcaggcaaacgacaacaacaacagcaactttccctggactgcggctacaaagtatcatctaaatggtcgggactcgttggttaatccaggaccagctatggccagccacaaagacgatgaagaaaagtttttccccatgcatggaaccctgatatttggtaaacaaggaacaaatgctaacgacgcggatttggaacatgtcatgattacagatgaagaagaaatcaggaccaccaatcccgtggctacagagcagtacggaaacgtgtcaaataatttgcaaaactcaaatactggtccaactacagaaaatgtcaatcaccagggagcgttacctggtatggtgtggcaggatcgagacgtgtacctgcagggacccatttgggccaagattcctcacaccgacggacactttcacccttctccactgatgggaggttttggactcaaacacccgcctcctcaaatcatgatcaaaaacactcctgttccagccaatcctcctacaaacttcagcgcggcaaagtttgcttccttcatcacacagtattccacgggacaggtcagcgtggagatcgagtgggagctgcagaaggagaacagcaaacgctggaaccccgagatccagtacacttccaactacaacaaatctgttaatgtggactttactgtggacactaatggtgtgtattcagagcctcgccccattggcaccagatacctgactcgtaatctgtaa

SEQ ID NO: 4456 - DNA, 2208 bp, Artificial Sequence
  source: /note="Description of Artificial Sequence: Synthetic polynucleotide"
atggctgccgatggttatcttccagattggctcgaggacactctctctgaaggaataagacagtggtggaagctcaaacctggcccaccaccaccaaagcccgcagagcggcatcaggacgacagcaggggtcttgtgcttcctgggtacaagtacctcggacccttcaacggactcgacaaaggagagccggtcaacgaggcagacgctgcggccctcgagcacgacaaggcctacgaccggcagctcgacagcggagacaacccgtacctcaagtacaaccacgccgacgcggagtttcaggagcgtcttaaagaagatacgtcttttgggggcaacctcggacgagcagtcttccaggcgaaaaagagggttcttgaacctctgggcctggttgaggaacctgttaagacggctccgggaaaaaagaggccggtagagcactctcctgcggagccagactcctcctcgggaaccggaaaagcgggccagcagcctgcaagaaagagattgaatttcggtcagactggagacgcagactccgtacctgacccccagcctctcggacagccaccagcagcccccacaagtttgggatctactacaatggctacaggcagtggcgcaccaatggcagacaataacgagggtgccgatggagtgggtaattcctcaggaaattggcattgcgattcccaatggctgggcgacagagtcatcaccaccagcacccgaacctgggccctgcccacctacaacaaccacctctacaagcaaatctccagccaatcaggagcatcgaacgacaaccactactttggctacagcaccccttgggggtattttgacttcaacagattccactgtcacttctccccacgtgactggcaaagactcatcaacaacaactggggattccgacccaagagactcaacttcaagctctttaacattcaagtcaaagaggtcacgcagaatgacggtacgacgacgattgccaataaccttaccagcacggttcaggtgtttactgactcggagtaccagctcccgtacgtcctcggctcggcgcatcaaggatgcctcccgccgtttccagcggacgtcttcatggtcccacagtatggatacctcaccctgaacaacgggagtcaggcggtaggacgctcttccttttactgcctggagtactttccttctcagatgctgcgtaccggaaacaactttaccttcagctacacctttgaggacgtgcctttccacagcagctacgctcacagccagagtttggaccggctgatgaatcctctgatcgaccagtatctgtattatctgaacaggacacaatcaaatagtggaactcttcagcagtctaggctactgtttagccaagctggacccaccagcatgtctcttcaagctaaaaactggctgcctggaccttgctacagacagcagcgtctgtcaaagcaggcaaacgacaacaacaacagcaactttccctggactgcggctacaaagtatcatctaaatggtcgggactcgttggttaatccaggaccagctatggccagccacaaagacgatgaagaaaagtttttccccatgcatggaaccctgatatttggtaaacaaggaacaaatgctaacgacgcggatttggaacatgtcatgattacagatgaagaagaaatcaggaccaccaatcccgtggctacagagcagtacggaaacgtgtcaaataatttgcaaaactcaaatactggtccaactacagaaaatgtcaatcaccagggagcgttacctggtatggtgtggcaggatcgagacgtgtacctgcagggacccatttgggccaagattcctcacaccgacggacactttcgcccttctccactgatgggaggttttggactcaaacacccgcctcctcaaatcatgatcaaaaacactcctgttccagccaatcctcctacaaacttcagcgcggcaaagtttgcttccttcatcacacagtattccacgggacaggtcagcgtggagatcgagtgggagctgcagaaggagaacagcaaacgctggaaccccgagatccagtacacttccaactacaacaaatctgttaatgtggactttactgtggacactaatggtgtgtattcagagcctcgccccattggcaccagatacctgactcgtaatctgtaa

SEQ ID NO: 4457 - DNA, 2208 bp, Artificial Sequence
  source: /note="Description of Artificial Sequence: Synthetic polynucleotide"
atggctgccgatggttatcttccagattggctcgaggacactctctctgaaggaataagacagtggtggaagctcaaacctggcccaccaccaccaaagcccgcagagcggcatcaggacgacagcaggggtcttgtgcttcctgggtacaagtacctcggacccttcaacggactcgacaaaggagagccggtcaacgaggcagacgctgcggccctcgagcacgacaaggcctacgaccggcagctcgacagcggagacaacccgtacctcaagtacaaccacgccgacgcggagtttcaggagcgtcttaaagaagatacgtcttttgggggcaacctcggacgagcagtcttccaggcgaaaaagagggttcttgaacctctgggcctggttgaggaacctgttaagacggctccgggaaaaaagaggccggtagagcactctcctgcggagccagactcctcctcgggaaccggaaaagcgggccagcagcctgcaagaaagagattgaatttcggtcagactggagacgcagactccgtacctgacccccagcctctcggacagccaccagcagcccccacaagtttgggatctactacaatggctacaggcagtggcgcaccaatggcagacaataacgagggtgccgatggagtgggtaattcctcaggaaattggcattgcgattcccaatggctgggcgacagagtcatcaccaccagcacccgaacctgggccctgcccacctacaacaaccacctctacaagcaaatctccagccaatcaggagcatcgaacgacaaccactactttggctacagcaccccttgggggtattttgacttcaacagattccactgtcacttctccccacgtgactggcaaagactcatcaacaacaactggggattccgacccaagagactcaacttcaagctctttaacattcaagtcaaagaggtcacgcagaatgacggtacgacgacgattgccaataaccttaccagcacggttcaggtgtttactgactcggagtaccagctcccgtacgtcctcggctcggcgcatcaaggatgcctcccgccgtttccagcggacgtcttcatggtcccacagtatggatacctcaccctgaacaacgggagtcaggcggtaggacgctcttccttttactgcctggagtactttccttctcagatgctgcgtaccggaaacaactttaccttcagctacacctttgaggacgtgcctttccacagcagctacgctcacagccagagtttggaccggctgatgaatcctctgatcgaccagtatctgtattatctgaacaggacacaatcaaatagtggaactcttcagcagtctaggctactgtttagccaagctggacccaccagcatgtctcttcaagctaaaaactggctgcctggaccttgctacagacagcagcgtctgtcaaagcaggcaaacgacaacaacaacagcaactttccctggactgcggctacaaagtatcatctaaatggtcgggactcgttggttaatccaggaccagctatggccagccacaaagacgatgaagaaaagtttttccccatgcatggaaccctgatatttggtaaacaaggaacaaatgctaacgacgcggatttggaacatgtcatgattacagatgaagaagaaatcaggaccaccaatcccgtggctacagagcagtacggaaacgtgtcaaataatttgcaaaactcaaatactggtccaactacagaaaatgtcaatcaccagggagcgttacctggtatggtgtggcaggatcgagacgtgtacctgcagggacccatttgggccaagattcctcacaccgacggacactttcacccttctccactgatgggaggttttggactcaaacacccgcctcctcaaatcatgatcaaaaacactcctgttccagccaatcctcctacaaacttcagcgcggcaaagtctgcttccttcatcacacagtattccacgggacaggtcagcgtggagatcgagtgggagctgcagaaggagaacagcaaacgctggaaccccgagatccagtacacttccaactacaacaaatctgttaatgtggactttactgtggacactaatggtgtgtattcagagcctcgccccattggcaccagatacctgactcgtaatctgtaa

SEQ ID NO: 4458 - DNA, 2208 bp, Artificial Sequence
  source: /note="Description of Artificial Sequence: Synthetic polynucleotide"
atggctgccgatggttatcttccagattggctcgaggacactctctctgaaggaataagacagtggtggaagctcaaacctggcccaccaccaccaaagcccgcagagcggcatcaggacgacagcaggggtcttgtgcttcctgggtacaagtacctcggacccttcaacggactcgacaaaggagagccggtcaacgaggcagacgctgcggccctcgagcacgacaaggcctacgaccggcagctcgacagcggagacaacccgtacctcaagtacaaccacgccgacgcggagtttcaggagcgtcttaaagaagatacgtcttttgggggcaacctcggacgagcagtcttccaggcgaaaaagagggttcttgaacctctgggcctggttgaggaacctgttaagacggctccgggaaaaaagaggccggtagagcactctcctgcggagccagactcctcctcgggaaccggaaaagcgggccagcagcctgcaagaaagagattgaatttcggtcagactggagacgcagactccgtacctgacccccagcctctcggacagccaccagcagcccccacaagtttgggatctactacaatggctacaggcagtggcgcaccaatggcagacaataacgagggtgccgatggagtgggtaattcctcaggaaattggcattgcgattcccaatggctgggcgacagagtcatcaccaccagcacccgaacctgggccctgcccacctacaacaaccacctctacaagcaaatctccagccaatcaggagcatcgaacgacaaccactactttggctacagcaccccttgggggtattttgacttcaacagattccactgtcacttctccccacgtgactggcaaagactcatcaacaacaactggggattccgacccaagagactcaacttcaagctctttaacattcaagtcaaaggggtcacgcagaatgacggtacgacgacgattgccaataaccttaccagcacggttcaggtgtttactgactcggagtaccagctcccgtacgtcctcggctcggcgcatcaaggatgcctcccgccgtttccagcggacgtcttcatggtcccacagtatggatacctcaccctgaacaacgggagtcaggcggtaggacgctcttccttttactgcctggagtactttccttctcagatgctgcgtaccggaaacaactttaccttcagctacacctttgaggacgtgcctttccacagcagctacgctcacagccagagtttggaccggctgatgaatcctctgatcgaccagtatctgtattatctgaacaggacacaatcaaatagtggaactcttcagcagtctaggctactgtttagccaagctggacccaccagcatgtctcttcaagctaaaaactggctgcctggaccttgctacagacagcagcgtctgtcaaagcaggcaaacgacaacaacaacagcaactttccctggactgcggctacaaagtatcatctaaatggtcgggactcgttggttaatccaggaccagctatggccagccacaaagacgatgaagaaaagtttttccccatgcatggaaccctgatatttggtaaacaaggaacaaatgctaacgacgcggatttggaacatgtcatgattacagatgaagaagaaatcaggaccaccaatcccgtggctacagagcagtacggaaacgtgtcaaataatttgcaaaactcaaatactggtccaactacagaaaatgtcaatcaccagggagcgttacctggtatggtgtggcaggatcgagacgtgtacctgcagggacccatttgggccaagattcctcacaccgacggacactttcacccttctccactgatgggaggttttggactcaaacacccgcctcctcaaatcatgatcaaaaacactcctgttccagccaatcctcctacaaacttcagcgcggcaaagtttgcttccttcatcacacagtattccacgggacaggtcagcgtggagatcgagtgggagctgcagaaggagaacagcaaacgctggaaccccgagatccagtacacttccaactacaacaaatctgttaatgtggactttactgtggacactaatggtgtgtattcagagcctcgccccattggcaccagatacctgactcgtaatctgtaa

SEQ ID NO: 4459 - DNA, 2208 bp, Artificial Sequence
  source: /note="Description of Artificial Sequence: Synthetic polynucleotide"
atggctgccgatggttatcttccagattggctcgaggacactctctctgaaggaataagacagtggtggaagctcaaacctggcccaccaccaccaaagcccgcagagcggcatcaggacgacagcaggggtcttgtgcttcctgggtacaagtacctcggacccttcaacggactcgacaaaggagagccggtcaacgaggcagacgctgcggccctcgagcacgacaaggcctacgaccggcagctcgacagcggagacaacccgtacctcaagtacaaccacgccgacgcggagtttcaggagcgtcttaaagaagatacgtcttttgggggcaacctcggacgagcagtcttccaggcgaaaaagagggttcttgaacctctgggcctggttgaggaacctgttaagacggctccgggaaaaaagaggccggtagagcactctcctgcggagccagactcctcctcgggaaccggaaaagcgggccagcagcctgcaagaaagagattgaatttcggtcagactggagacgcagactccgtacctgacccccagcctctcggacagccaccagcagcccccacaagtttgggatctactacaatggctacaggcagtggcgcaccaatggcagacaataacgagggtgccgatggagtgggtaattcctcaggaaattggcattgcgattcccaatggctgggcgacagagtcatcaccaccagcacccgaacctgggccctgcccacctacaacaaccacctctacaagcaaatctccagccaatcaggagcatcgaacgacaaccactactttggctacagcaccccttgggggtattttgacttcaacagattccactgtcacttctccccacgtgactggcaaagactcatcaacaacaactggggattccgacccaagagactcaacttcaagctctttaacattcaagtcaaagaggtcacgcagaatgacggtacgacgacgattgccaataaccttaccagcacggttcaggtgtttactgactcggagtaccagctcccgtacgtcctcggctcggcgcatcaaggatgcctcccgccgtttccagcggacgtcttcatggtcccacagtatggatacctcaccctgaacaacgggagtcaggcggtaggacgctcttccttttactgcctggagtactttccttctcagatgctgcgtaccggaaacaactttaccttcagctacacctttgaggacgtgcctttccacagcagctacgctcacagccagagtttggaccggctgatgaatcctctgatcgaccagtatctgtattatctgaacaggacacaatcaaatagtggaactcttcagcagtctaggctactgtttagccaagctggacccaccagcatgtctcttcaagctaaaaactggctgcctggaccttgctacagacagcagcgtctgtcaaagcaggcaaacgacaacaacaacagcaactttccctggactgcggctacaaagtatcatctaaatggtcgggactcgttggttaatccaggaccagctatggccagccacaaagacgatgaagaaaagtttttccccatgcatggaaccccgatatttggtaaacaaggaacaaatgctaacgacgcggatttggaacatgtcatgattacagatgaagaagaaatcaggaccaccaatcccgtggctacagagcagtacggaaacgtgtcaaataatttgcaaaactcaaatactggtccaactacagaaaatgtcaatcaccagggagcgttacctggtatggtgtggcaggatcgagacgtgtacctgcagggacccatttgggccaagattcctcacaccgacggacactttcacccttctccactgatgggaggttttggactcaaacacccgcctcctcaaatcatgatcaaaaacactcctgttccagccaatcctcctacaaacttcagcgcggcaaagtttgcttccttcatcacacagtattccacgggacaggtcagcgtggagatcgagtgggagctgcagaaggagaacagcaaacgctggaaccccgagatccagtacacttccaactacaacaaatctgttaatgtggactttactgtggacactaatggtgtgtattcagagcctcgccccattggcaccagatacctgactcgtaatctgtaa

SEQ ID NO: 4460 - DNA, 2208 bp, Artificial Sequence
  source: /note="Description of Artificial Sequence: Synthetic polynucleotide"
atggctgccgatggttatcttccagattggctcgaggacactctctctgaaggaataagacagtggtggaagctcaaacctggcccaccaccaccaaagcccgcagagcggcatcaggacgacagcaggggtcttgtgcttcctgggtacaagtacctcggacccttcaacggactcgacaaaggagagccggtcaacgaggcagacgctgcggccctcgagcacgacaaggcctacgaccggcagctcgacagcggagacaacccgtacctcaagtacaaccacgccgacgcggagtttcaggagcgtcttaaagaagatacgtcttttgggggcaacctcggacgagcagtcttccaggcgaaaaagggggttcttgaacctctgggcctggttgaggaacctgttaagacggctccgggaaaaaagaggccggtagagcactctcctgcggagccagactcctcctcgggaaccggaaaagcgggccagcagcctgcaagaaagagattgaatttcggtcagactggagacgcagactccgtacctgacccccagcctctcggacagccaccagcagcccccacaagtttgggatctactacaatggctacaggcagtggcgcaccaatggcagacaataacgagggtgccgatggagtgggtaattcctcaggaaattggcattgcgattcccaatggctgggcgacagagtcatcaccaccagcacccgaacctgggccctgcccacctacaacaaccacctctacaagcaaatctccagccaatcaggagcatcgaacgacaaccactactttggctacagcaccccttgggggtattttgacttcaacagattccactgtcacttctccccacgtgactggcaaagactcatcaacaacaactggggattccgacccaagagactcaacttcaagctctttaacattcaagtcaaagaggtcacgcagaatgacggtacgacgacgattgccaataaccttaccagcacggttcaggtgtttactgactcggagtaccagctcccgtacgtcctcggctcggcgcatcaaggatgcctcccgccgtttccagcggacgtcttcatggtcccacagtatggatacctcaccctgaacaacgggagtcaggcggtaggacgctcttccttttactgcctggagtactttccttctcagatgctgcgtaccggaaacaactttaccttcagctacacctttgaggacgtgcctttccacagcagctacgctcacagccagagtttggaccggctgatgaatcctctgatcgaccagtatctgtattatctgaacaggacacaatcaaatagtggaactcttcagcagtctaggctactgtttagccaagctggacccaccagcatgtctcttcaagctaaaaactggctgcctggaccttgctacagacagcagcgtctgtcaaagcaggcaaacgacaacaacaacagcaactttccctggactgcggctacaaagtatcatctaaatggtcgggactcgttggttaatccaggaccagctatggccagccacaaagacgatgaagaaaagtttttccccatgcatggaaccctgatatttggtaaacaaggaacaaatgctaacgacgcggatttggaacatgtcatgattacagatgaagaagaaatcaggaccaccaatcccgtggctacagagcagtacggaaacgtgtcaaataatttgcaaaactcaaatactggtccaactacagaaaatgtcaatcaccagggagcgttacctggtatggtgtggcaggatcgagacgtgtacctgcagggacccatttgggccaagattcctcacaccgacggacactttcacccttctccactgatgggaggttttggactcaaacacccgcctcctcaaatcatgatcaaaaacactcctgttccagccaatcctcctacaaacttcagcgcggcaaagtttgcttccttcatcacacagtattccacgggacaggtcagcgtggagatcgagtgggagctgcagaaggagaacagcaaacgctggaaccccgagatccagtacacttccaactacaacaaatctgttaatgtggactttactgtggacactaatggtgtgtattcagagcctcgccccattggcaccagatacctgactcgtaatctgtaa

SEQ ID NO: 4461 - DNA, 2208 bp, Artificial Sequence
  source: /note="Description of Artificial Sequence: Synthetic polynucleotide"
atggctgccgatggttatcttccagattggctcgaggacactctctctgaaggaataagacagtggtggaagctcaaacctggcccaccaccaccaaagcccgcagagcggcatcaggacgacagcaggggtcttgtgcttcctgggtacaagtacctcggacccttcaacggactcgacaaaggagagccggtcaacgaggcagacgctgcggccctcgagcacgacaaggcctacgaccggcagctcgacagcggagacaacccgtacctcaagtacaaccacgccgacgcggagtttcaggagcgtcttaaagaagatacgtcttttgggggcaacctcggacgagcagtcttccaggcgaaaaagagggttcttgaacctctgggcctggttgaggaacctgttaagacggctccgggaaaaaagaggccggtagagcactctcctgcggagccagactcctcctcgggaaccggaaaagcgggccagcagcctgcaagaaagagattgaatttcggtcagactggagacgcagactccgtacctgacccccagcctctcggacagccaccagcagcccccacaagtttgggatctactacaatggctacaggcagtggcgcaccaatggcagacaataacgagggtgccgatggagtgggtaattcctcaggaaattggcattgcgattcccaatggctgggcgacagagtcatcaccaccagcacccgaacctgggccctgcccacctacaacaaccacctctacaagcaaatctccagccaatcaggagcatcgaacgacaaccactactttggctacagcaccccttgggggtattttgacttcaacagattccactgtcacttctccccacgtgactggcaaagactcatcaacaacaactggggattccgacccaagagactcaacttcaagctctttaacattcaagtcaaagaggtcacgcagaatgacggtacgacgacgattgccaataaccttaccagcacggttcaggtgtttactgactcggagtaccagctcccgtacgtcctcggctcggcgcatcaaggatgcctcccgccgtttccagcggacgtcttcatggtcccacagtatggatacctcaccctgaacaacgggagtcaggcggtaggacgctcttccttttactgcctggagtactttccttctcagatgctgcgtaccggaaacaactttaccttcagctacacctttgaggacgtgcctttccacagcagctacgctcacagccagagtttggaccggctgatgaatcctctgatcggccagtatctgtattatctgaacaggacacaatcaaatagtggaactcttcagcagtctaggctactgtttagccaagctggacccaccagcatgtctcttcaagctaaaaactggctgcctggaccttgctacagacagcagcgtctgccaaagcaggcaaacgacaacaacaacagcaactttccctggactgcggctacaaagtatcatctaaatggtcgggactcgttggttaatccaggaccagctatggccagccacaaagacgatgaagaaaagtttttccccatgcatggaaccctgatatttggtaaacaaggaacaaatgctaacgacgcggatttggaacatgtcatgattacagatgaagaagaaatcaggaccaccaatcccgtggctacagagcagtacggaaacgtgtcaaataatttgcaaaactcaaatactggtccaactacagaaaatgtcaatcaccagggagcgttacctggtatggtgtggcaggatcgagacgtgtacctgcagggacccatttgggccaagattcctcacaccgacggacactttcacccttctccactgatgggaggttttggactcaaacacccgcctcctcaaatcatgatcaaaaacactcctgttccagccaatcctcctacaaacttcagcgcggcaaagtttgcttccttcatcacacagtattccacgggacaggtcagcgtggagatcgagtgggagctgcagaaggagaacagcaaacgctggaaccccgagatccagtacacttccaactacaacaaatctgttaatgtggactttactgtggacactaatggtgtgtattcagagcctcgccccattggcaccagatacctgactcgtaatctgtaa

SEQ ID NO: 4462 - DNA, 2208 bp, Artificial Sequence
  source: /note="Description of Artificial Sequence: Synthetic polynucleotide"
atggctgccgatggttatcttccagattggctcgaggacactctctctgaaggaataagacagtggtggaagctcaaacctggcccaccaccaccaaagcccgcagagcggcatcaggacgacagcaggggtcttgtgcttcctgggtacaagtacctcggacccttcaacggactcgacaaaggagagccggtcaacgaggcagacgctgcggccctcgagcacgacaaggcctacgaccggcagctcgacagcggagacaacccgtacctcaagtacaaccacgccgacgcggagtttcaggagcgtcttaaagaagatacgtcttttgggggcaacctcggacgagcagtcttccaggcgaaaaagagggttcttgaacctctgggcctggttgaggaacctgttaagacggctccgggaaaaaagaggccggtagagcactctcctgcggagccagactcctcctcgggaaccggaaaagcgggccagcagcctgcaagaaagagattgaatttcggtcagactggagacgcagactccgtacctgacccccagcctctcggacagccaccagcagcccccacaagtttgggatctactacaatggctacaggcagtggcgcaccaatggcagacaataacgagggtgccgatggagtgggtaattcctcaggaaattggcattgcgattcccaatggctgggcgacagagtcatcaccaccagcacccgaacctgggccctgcccacctacaacaaccacctctacaagcaaatctccagccaatcaggagcatcgaacgacaaccactactttggctacagcaccccttgggggtattttgacttcaacagattccactgtcacttctccccacgtgactggcaaagactcatcaacaacaactggggattccgacccaagagactcaacttcaagctctttaacattcaagtcaaagaggtcacgcagaatgacggtacgacgacgattgccaataaccttaccagcacggttcaggtgtttactgactcggagtaccagctcccgtacgtcctcggctcggcgcatcaaggatgcctcccgccgtttccagcggacgtcttcatggtcccacagtatggatacctcaccctgaacaacgggagtcaggcggtaggacgctcttccttttactgcctggagtactttccttctcagatgctgcgtaccggaaacaactttaccttcagctacacctttgaggacgtgcctttccacagcagctacgctcacagccagagtttggaccggctgatgaatcctctgatcgaccagtatctgtattatctgaacaggacacaatcaaatagtggaactcttcagcagtctaggctactgtttagccaagctggacccaccagcatgtctcttcaagctaaaaactggctgcctggaccttgctacagacagcagcgtctgtcaaagcaggcaaacgacaacaacaacagcaactttccctggactgcggctacaaagtatcatctaaatggtcgggactcgttggttaatccaggaccagctatggccagccacaaagacgatgaagaaaagtttttccccatgcatggaaccctgatatttggtaaacaaggaacaaatgctaacgacgcggatttggaacatgtcatgattacagatgaagaagaaatcaggaccaccaatcccgtggctacagagcagtacggaaacgtgtcaaataatttgcaaaactcaaatactggtccaactacagaaaatgtcaatcaccagggagcgttacctggtatggtgtggcaggatcgagacgtgtacctgcagggacccatttgggccaagattcctcacaccgacggacgctttcacccttctccactgatgggaggttttggactcaaacacccgcctcctcaaatcatgatcaaaaacactcctgttccagccaatcctcctacaaacttcagcgcggcaaagtttgcttccttcatcacacagtattccacgggacaggtcagcgtggagatcgagtgggagctgcagaaggagaacagcaaacgctggaaccccgagatccagtacacttccaactacaacaaatctgttaatgtggactttactgtggacactaatggtgtgtattcagagcctcgccccattggcaccagatacctgactcgtaatctgtaa

SEQ ID NO: 4463 - DNA, 2208 bp, Artificial Sequence
  source: /note="Description of Artificial Sequence: Synthetic polynucleotide"
atggctgccgatggttatcttccagattggctcgaggacactctctctgaaggaataagacagtggtggaagctcaaacctggcccaccaccaccaaagcccgcagagcggcatcaggacgacagcaggggtcttgtgcttcctgggtacaagtacctcggacccttcaacggactcgacaaaggagagccggtcaacgaggcagacgctgcggccctcgagcacgacaaggcctacgaccggcagctcgacagcggagacaacccgtacctcaagtacaaccacgccgacgcggagtttcaggagcgtcttaaagaagatacgtcttttgggggcaacctcggacgagcagtcttccaggcgaaaaagagggttcttgaacctctgggcctggttgaggaacctgttaagacggctccgggaaaaaagaggccggtagagcactctcctgcggagccagactcctcctcgggaaccggaaaagcgggccagcagcctgcaagaaagagattgaatttcggtcagactggagacgcagactccgtacctgacccccagcctctcggacagccaccagcagcccccacaagtttgggatctactacaatggctacaggcagtggcgcaccaatggcagacaataacgagggtgccgatggagtgggtaattcctcaggaaattggcattgcgattcccaatggctgggcgacagagtcatcaccaccagcacccgaacctgggccctgcccacctacaacaaccacctctacaagcaaatctccagccaatcaggagcatcgaacgacaaccactactttggctacagcaccccttgggggtattttgacttcaacagattccactgtcacttctccccacgtgactggcaaagactcatcaacaacaactggggattccgacccaagagactcaacttcaagctctttaacattcaagtcaaagaggtcacgcagaatgacggtacgacgacgattgccaataaccttaccagcacggttcaggtgtttactgactcggagtaccagctcccgtacgtcctcggctcggcgcatcaaggatgcctcccgccgtttccagcggacgtcttcatggtcccacagtatggatacctcaccctgaacaacgggagtcaggcggtaggacgctcttccttttactgcctggagtactttccttctcagatgctgcgtaccggaaacaactttaccttcagctacacctttgaggacgtgcctttccacagcagctacgctcacagccagagtttggaccggctgatgaatcctctgatcgaccagtatctgtattatctgaacaggacacaatcaaatagtggaactcttcagcagtctaggctactgtttagccaagctggacccaccagcatgtctcttcaagctaaaaactggctgcctggaccttgctacagacagcagcgtctgtcaaagcaggcaaacgacaacaacaacagcaactttccctggactgcggctacaaagtatcatctaaatggtcgggactcgttggttaatccaggaccagctatggccagccacaaagacgatgaagaaaagtttttccccatgcatggagccctgatatttggtaaacaaggaacaaatgctaacgacgcggatttggaacatgtcatgattacagatgaagaagaaatcaggaccaccaatcccgtggctacagagcagtacggaaacgtgtcaaataatttgcaaaactcaaatactggtccaactacagaaaatgtcaatcaccagggagcgttacctggtatggtgtggcaggatcgagacgtgtacctgcagggacccatttgggccaagattcctcacaccgacggacactttcacccttctccactgatgggaggttttggactcaaacacccgcctcctcaaatcatgatcaaaaacactcctgttccagccaatcctcctacaaacttcagcgcggcaaagtttgcttccttcatcacacagtattccacgggacaggtcagcgtggagatcgagtgggagctgcagaaggagaacagcaaacgctggaaccccgagatccagtacacttccaactacaacaaatctgttaatgtggactttactgtggacactaatggtgtgtattcagagcctcgccccattggcaccagatacctgactcgtaatctgtaa

SEQ ID NO: 4464 - DNA, 2208 bp, Artificial Sequence
  source: /note="Description of Artificial Sequence: Synthetic polynucleotide"
atggctgccgatggttatcttccagattggctcgaggacactctctctgaaggaataagacagtggtggaagctcaaacctggcccaccaccaccaaagcccgcagagcggcatcaggacgacagcaggggtcttgtgcttcctgggtacaagtacctcggacccttcaacggactcgacaaaggagagccggtcaacgaggcagacgctgcggccctcgagcacgacaaggcctacgaccggcagctcgacagcggagacaacccgtacctcaagtacaaccacgccgacgcggagtttcaggagcgtcttaaagaagatacgtcttttgggggcaacctcggacgagcagtcttccaggcgaaaaagagggttcttgaacctctgggcctggttgaggaacctgttaagacggctccgggaaaaaagaggccggtagagcactctcctgcggagccagactcctcctcgggaaccggaaaagcgggccagcagcctgcaagaaagagattgaatttcggtcagactggagacgcagactccgtacctgacccccagcctctcggacagccaccagcagcccccacaagtttgggatctactacaatggctacaggcagtggcgcaccaatggcagacaataacgagggtgccgatggagtgggtaattcctcaggaaattggcattgcgattcccaatggctgggcgacagagtcatcaccaccagcacccgaacctgggccctgcccacctacaacaaccacctctacaagcaaatctccagccaatcaggagcatcgaacgacaaccactactttggctacagcaccccttgggggtattttgacttcaacagattccactgtcacttctccccacgtgactggcaaagactcatcaacaacaactggggattccgacccaagagactcaacttcaagctctttaacattcaagtcaaagaggtcacgcagaatgacggtacgacgacgattgccaataaccttaccagcacggttcaggtgtttactgactcggagtaccagctcccgtacgtcctcggctcggcgcatcaaggatgcctcccgccgtttccagcggacgtcttcatggtcccacagtatggatacctcaccctgaacaacgggagtcaggcggtaggacgctcttccttttactgcctggagtactttccttctcagatgctgcgtaccggaaacaactttaccttcagctacacctttgaggacgtgcctttccacagcagctacgctcacagccagagtttggaccggctgatgaatcctctgatcgaccagtatctgtattatctgaacaggacacaatcaaatagtggaactcttcagcagtctaggctactgtttagccaagctggacccaccagcatgtctcttcaagctaaaaactggctgcctggaccttgctacagacagcagcgtctgtcaaagcaggcaaacgacaacaacaacagcaactttccctggactgcggctacaaagtatcatctaaatggtcgggactcgttggttaatccaggaccagctatggccagccacaaagacgatgaagaaaagtttttccccatgcatggaaccctgatatttggtaaacaaggaacaaatgctaacgacgcggatttggaacatgccatgattacagatgaagaagaaatcaggaccaccaatcccgtggctacagagcagtacggaaacgtgtcaaataatttgcaaaactcaaatactggtccaactacagaaaatgtcaatcaccagggagcgttacctggtatggtgtggcaggatcgagacgtgtacctgcagggacccatttgggccaagattcctcacaccgacggacactttcacccttctccactgatgggaggttttggactcaaacacccgcctcctcaaatcatgatcaaaaacactcctgttccagccaatcctcctacaaacttcagcgcggcaaagtttgcttccttcatcacacagtattccacgggacaggtcagcgtggagatcgagtgggagctgcagaaggagaacagcaaacgctggaaccccgagatccagtacacttccaactacaacaaatctgttaatgtggactttactgtggacactaatggtgtgtattcagagcctcgccccattggcaccagatacctgactcgtaatctgtaa

SEQ ID NO: 4465 - DNA, 2208 bp, Artificial Sequence
  source: /note="Description of Artificial Sequence: Synthetic polynucleotide"
atggctgccgatggttatcttccagattggctcgaggacactctctctgaaggaataagacagtggtggaagctcaaacctggcccaccaccaccaaagcccgcagagcggcatcaggacgacagcaggggtcttgtgcttcctgggtacaagtacctcggacccttcaacggactcgacaaaggagagccggtcaacgaggcagacgctgcggccctcgagcacgacaaggcctacgaccggcagctcgacagcggagacaacccgtacctcaagtacaaccacgccgacgcggagtttcaggagcgtcttaaagaagatacgtcttttgggggcaacctcggacgagcagtcttccaggcgaaaaagagggttcttgaacctctgggcctggttgaggaacctgttaagacggctccgggaaaaaagaggccggtagagcactctcctgcggagccagactcctcctcgggaaccggaaaagcgggccagcagcctgcaagaaagagattgaatttcggtcagactggagacgcagactccgtacctgacccccagcctctcggacagccaccagcagcccccacaagtttgggatctactacaatggctacaggcagtggcgcaccaatggcagacaataacgagggtgccgatggagtgggtaattcctcaggaaattggcattgcgattcccaatggctgggcgacagagtcatcaccaccagcacccgaacctgggccctgcccacctacaacaaccacctctacaagcaaatctccagccaatcaggagcatcgaacgacaaccactactttggctacagcaccccttgggggtattttgacttcaacagattccactgtcacttctccccacgtgactggcaaagactcatcaacaacaactggggattccgacccaagagactcaacttcaagctctttaacattcaagtcaaagaggtcacgcagaatgacggtacgacgacgattgccaataaccttaccagcacggttcaggtgtttactgactcggagtaccagctcccgtacgtcctcggctcggcgcatcaaggatgcctcccgccgtttccagcggacgtcttcatggtcccacagtatggatacctcaccctgaacaacgggagtcaggcggtaggacgctcttccttttactgcctggagtactttccttctcagatgctgcgtaccggaaacaactttaccttcagctacacctttgaggacgtgcctttccacagcagctacgctcacagccagagtttggaccggctgatgaatcctctgatcgaccagtatctgtattatctgaacaggacacaatcaaatagtggaactcttcagcagtctaggctactgtttagccaagctggacccaccagcatgtctcttcaagctaaaaactggctgcctggaccttgctacagacagcagcgtctgtcaaagcaggcaaacgacaacaacaacagcaactttccctggactgcggctacaaagtatcatctaaatggtcgggactcgttggttaatccaggaccagctatggccagccacaaagacgatgaagaaaagtttttccccatgcatggaaccctgatatttggtaaacaaggaacaaatgctaacgacgcggatttggaacatgtcatgattacagatgaagaagaaatcaggaccaccaatcccgtggctacagagcagtacggaaacgtgtcaaataatttgcaaaactcaaatactggtccaactacagaaaatgtcaatcaccagggagcgttacctggtatggtgtggcaggatcgagacgtgtacctgcagggacccatttgggccaagattcctcacaccgacggacactttcacccttctccactgatgggaggttttggactcaaacacccgcctcctcaaatcatgatcaaaaacactcctgttccagccaatcctcctacaaacttcagcgcggcaaagtttgcttccttcatcacacagtattccacgggacaggtcagcgtggagatcgagtgggagctgcagaaggagaacagcaaacgctggaaccccgagatccggtacacttccaactacaacaaatctgttaatgtggactttactgtggacactaatggtgtgtattcagagcctcgccccattggcaccagatacctgactcgtaatctgtaa

SEQ ID NO: 4466 - DNA, 2208 bp, Artificial Sequence
  source: /note="Description of Artificial Sequence: Synthetic polynucleotide"
atggctgccgatggttatcttccagattggctcgaggacactctctctgaaggaataagacagtggtggaagctcaaacctggcccaccaccaccaaagcccgcagagcggcatcaggacgacagcaggggtcttgtgcttcctgggtacaagtacctcggacccttcaacggactcgacaaaggagagccggtcaacgaggcagacgctgcggccctcgagcacgacaaggcctacgaccggcagctcgacagcggagacaacccgtacctcaagtacaaccacgccgacgcggagtttcaggagcgtcttaaagaagatacgtcttttgggggcaacctcggacgagcagtcttccaggcgaaaaagagggttcttgaacctctgggcctggttgaggaacctgttaagacggctccgggaaaaaagaggccggtagagcactctcctgcggagccagactcctcctcgggaaccggaaaagcgggccagcagcctgcaagaaagagattgaatttcggtcagactggagacgcagactccgtacctgacccccagcctctcggacagccaccagcagcccccacaagtttgggatctactacaatggctacaggcagtggcgcaccaatggcagacaataacgagggtgccgatggagtgggtaattcctcaggaaattggcattgcgattcccaatggctgggcgacagagtcatcaccaccagcacccgaacctgggccctgcccacctacaacaaccacctctacaagcaaatctccagccaatcaggagcatcgaacgacaaccactactttggctacagcaccccttgggggtattttgacttcaacagattccactgtcacttctccccacgtgactggcaaagactcatcaacaacaactggggattccgacccaagagactcaacttcaagctctttaacattcaagtcaaagaggtcacgcagaatgacggtacgacgacgattgccaataaccttaccagcacggttcaggtgtttactgactcggagtaccagctcccgtacgtcctcggctcggcgcatcaaggatgcctcccgccgtttccagcggacgtcttcatggtcccacagtatggatacctcaccctgaacaacgggagtcaggcggtaggacgctcttccttttactgcctggagtactttccttctcagatgctgcgtaccggaaacaactttaccttcagctacacctttgaggacgtgcctttccacagcagctacgctcacagccagagtttggaccggctgatgaatcctctgatcgaccagtatctgtattatctgaacaggacacaatcaaatagtggaactcttcagcagtctaggctactgtttagccaagctggacccaccagcatgtctcttcaagctaaaaactggctgcctggaccttgctacagacagcagcgtctgtcaaagcaggcaaacgacaacaacaacagcaactttccccggactgcggctacaaagtatcatctaaatggtcgggactcgttggttaatccaggaccagctatggccagccacaaagacgatgaagaaaagtttttccccatgcatggaaccctgatatttggtaaacaaggaacaaatgctaacgacgcggatttggaacatgtcatgattacagatgaagaagaaatcaggaccaccaatcccgtggctacagagcagtacggaaacgtgtcaaataatttgcaaaactcaaatactggtccaactacagaaaatgtcaatcaccagggagcgttacctggtatggtgtggcaggatcgagacgtgtacctgcagggacccatttgggccaagattcctcacaccgacggacactttcacccttctccactgatgggaggttttggactcaaacacccgcctcctcaaatcatgatcaaaaacactcctgttccagccaatcctcctacaaacttcagcgcggcaaagtttgcttccttcatcacacagtattccacgggacaggtcagcgtggagatcgagtgggagctgcagaaggagaacagcaaacgctggaaccccgagatccagtacacttccaactacaacaaatctgttaatgtggactttactgtggacactaatggtgtgtattcagagcctcgccccattggcaccagatacctgactcgtaatctgtaa

SEQ ID NO: 4467 - DNA, 2208 bp, Artificial Sequence
  source: /note="Description of Artificial Sequence: Synthetic polynucleotide"
atggctgccgatggttatcttccagattggctcgaggacactctctctgaaggaataagacagtggtggaagctcaaacctggcccaccaccaccaaagcccgcagagcggcatcaggacgacagcaggggtcttgtgcttcctgggtacaagtacctcggacccttcaacggactcgacaaaggagagccggtcaacgaggcagacgctgcggccctcgagcacgacaaggcctacgaccgacagctcgacagcggagacaacccgtacctcaagtacaaccacgccgacgcggagtttcaggagcgtcttaaagaagatacgtcttttgggggcaacctcggacgagcagtcttccaggcgaaaaagagggttcttgaacctctgggcctggttgaggaacctgttaagacggctccgggaaaaaagaggccggtagagcactctcctgcggagccagactcctcctcgggaaccggaaaagcgggccagcagcctgcaagaaagagattgaatttcggtcagactggagacgcagactccgtacctgacccccagcctctcggacagccaccagcagcccccacaagtttgggatctactacaatggctacaggcagtggcgcaccaatggcagacaataacgagggtgccgatggagtgggtaattcctcaggaaattggcattgcgattcccaatggctgggcgacagagtcatcaccaccagcacccgaacctgggccctgcccacctacaacaaccacctctacaagcaaatctccagccaatcaggagcatcgaacgacaaccactactttggctacagcaccccttgggggtattttgacttcaacagattccactgtcacttctccccacgtgactggcaaagactcatcaacaacaactggggattccgacccaagagactcaacttcaagctctttaacattcaagtcaaagaggtcacgcagaatgacggtacgacgacgattgccaataaccttaccagcacggttcaggtgtttactgactcggagtaccagctcccgtacgtcctcggctcggcgcatcaaggatgcctcccgccgtttccagcggacgtcttcatggtcccacagtatggatacctcaccctgaacaacgggagtcaggcggtaggacgctcttccttttactgcctggagtactttccttctcagatgctgcgtaccggaaacaactttaccttcagctacacctttgaggacgtgcctttccacagcagctacgctcacagccagagtttggaccggctgatgaatcctctgatcggccagtatctgtattatctgaacaggacacaatcaaatagtggaactcttcagcagtctaggctactgtttagccaagctggacccaccagcatgtctcttcaagctaaaaactggctgcctggaccttgctacagacagcagcgtctgtcaaagcaggcaaacgacaacaacaacagcaactttccctggactgcggctacaaagtatcatctaaatggtcgggactcgttggttaatccaggaccagctatggccagccacaaagacgatgaagaaaagtttttccccatgcatggaaccctgatatttggtaaacaaggaacaaatgctaacgacgcggatttggaacatgtcatgattacagatgaagaagaaatcaggaccaccaatcccgtggctacagagcagtacggaaacgtgtcaaataatttgcaaaactcaaatactggtccaactacagaaaatgtcaatcaccagggagcgttacctggtatggtgtggcaggatcgagacgtgtacctgcagggacccatttgggccaagattcctcacaccgacggacactttcacccttctccactgatgggaggttttggactcaaacacccgcctcctcaaatcatgatcaaaaacactcctgttccagccaatcctcctacaaacttcagcgcggcaaagtttgcttccttcatcacacagtattccacgggacaggtcagcgtggagatcgagtgggagctgcagaaggagaacagcaaacgctggaaccccgagatccagtacacttccaactacaacaaatctgttaatgtggactttactgtggacactaatggtgtgtattcagagcctcgccccattggcaccagatacctgactcgtaatctgtaa

SEQ ID NO: 4468 - DNA, 2208 bp, Artificial Sequence
  source: /note="Description of Artificial Sequence: Synthetic polynucleotide"
atggctgccgatggttatcttccagattggctcgaggacactctctctgaaggaataagacagtggtggaagctcaaacctggcccaccaccaccaaagcccgcagagcggcatcaggacgacagcaggggtcttgtgcttcctgggtacaagtacctcggacccttcaacggactcgacaaaggagagccggtcaacgaggcagacgctgcggccctcgagcacgacaaggcctacgaccggcagctcgacagcggagacaacccgtacctcaagtacaaccacgccgacgcggagtttcaggagcgtcttaaagaagatacgtcttttgggggcaacctcggacgagcagtcttccaggcgaaaaagagggttcttgaacctctgggcctggttgaggaacctgttaagacggctccgggaaaaaagaggccggtagagcactctcctgcggagccagactcctcctcgggaaccggaaaagcgggccagcagcctgcaagaaagagattgaatttcggtcagactggagacgcagactccgtacctgacccccagcctctcggacagccaccagcagcccccacaagtttgggatctactacaatggctacaggcagtggcgcaccaatggcagacaataacgagggtgccgatggagtgggtaattcctcaggaaattggcattgcgattcccaatggctgggcgacagagtcatcaccaccagcacccgaacctgggccctgcccacctacaacaaccacctctacaagcaaatctccagccaatcaggagcatcgaacgacaaccactactttggctacagcaccccttgggggtattttgacttcaacagattccactgtcacttctccccacgtgactggcaaagactcatcaacaacaactggggattccgacccaagagactcaacttcaagctctttaacattcaagtcaaagaggtcacgcagaatgacggtacgacgacgattgccaataaccttaccagcacggttcaggtgtttactgactcggagtaccagctcccgtacgtcctcggctcggcgcatcaaggatgcctcccgccgtttccagcggacgtcttcatggtcccacagtatggatacctcaccctgaacaacgggagtcaggcggtaggacgctcttccttttactgcctggagtactttccttctcagatgctgcgtaccggaaacaactttaccttcagctacacctttgaggacgtgcctttccacagcagctacgctcacagccagagtttggaccggctgatgaatcctctgatcgaccagtatctgtattatctgaacaggacacaatcaaatagtggaactcttcagcagtctaggctactgtttagccaagctggacccaccagcatgtctcttcaagctaaaaactggctgcctggaccttgctacagacagcagcgtctgtcaaagcaggcaaacgacaacaacaacagcaactttccctggactgcggctacaaagtatcatctaaatggtcgggactcgttggttaatccaggaccagctatggccagccacaaagacgatgaagaaaagtttttccccatgcatggaaccctgatatttggtaaacaaggaacaaatgctaacgacgcggatttggaacatgtcatgattacagatgaagaagaaatcaggaccaccaatcccgtggctacagagcagtacggaaacgtgtcaaataatttgcaaaactcaaatactggtccaactacagaaaatgtcaatcaccagggagcgttacctggtatggtgtggcaggatcgagacgtgtacctgcagggacccatttgggccaagattcctcacaccgacggacactttcacccttctccactgatgggaggttttggactcaaacacccgcctcctcaaatcatgatcaaaaacactcctgttccagccaatcctcctacaaacttcagcgcggcaaagtttgcttccttcatcacacagtattccacgggacaggtcggcgtggagatcgagtgggagctgcagaaggagaacagcaaacgctggaaccccgagatccagtacacttccaactacaacaaatctgttaatgtggactttactgtggacactaatggtgtgtattcagagcctcgccccattggcaccagatacctgactcgtaatctgtaa

SEQ ID NO: 4469 - DNA, 2208 bp, Artificial Sequence
  source: /note="Description of Artificial Sequence: Synthetic polynucleotide"
atggctgccgatggttatcttccagattggctcgaggacactctctctgaaggaataagacagtggtggaagctcaaacctggcccaccaccaccaaagcccgcagagcggcatcaggacgacagcaggggtcttgtgcttcctgggtacaagtacctcggacccttcaacggactcgacaaaggagagccggtcaacgaggcagacgctgcggccctcgagcacgacaaggcctacgaccggcagctcgacagcggagacaacccgtacctcaagtacaaccacgccgacgcggagtttcaggagcgtcttaaagaagatacgtcttttgggggcaacctcggacgagcagtcttccaggcgaaaaagagggttcttgaacctctgggcctggttgaggaacctgttaagacggctccgggaaaaaagaggccggtagagcactctcctgcggagccagactcctcctcgggaaccggaaaagcgggccagcagcctgcaagaaagagattgaatttcggtcagactggagacgcagactccgtacctgacccccagcctctcggacagccaccagcagcccccacaagtttgggatctactacaatggctacaggcagtggcgcaccaatggcagacaataacgagggtgccgatggagtgggtaattcctcaggaaattggcattgcgattcccaatggctgggcgacagagccatcaccaccagcacccgaacctgggccctgcccacctacaacaaccacctctacaagcaaatctccagccaatcaggagcatcgaacgacaaccactactttggctacagcaccccttgggggtattttgacttcaacagattccactgtcacttctccccacgtgactggcaaagactcatcaacaacaactggggattccgacccaagagactcaacttcaagctctttaacattcaagtcaaagaggtcacgcagaatgacggtacgacgacgattgccaataaccttaccagcacggttcaggtgtttactgactcggagtaccagctcccgtacgtcctcggctcggcgcatcaaggatgcctcccgccgtttccagcggacgtcttcatggtcccacagtatggatacctcaccctgaacaacgggagtcaggcggtaggacgctcttccttttactgcctggagtactttccttctcagatgctgcgtaccggaaacaactttaccttcagctacacctttgaggacgtgcctttccacagcagctacgctcacagccagagtttggaccggctgatgaatcctctgatcgaccagtatctgtattatctgaacaggacacaatcaaatagtggaactcttcagcagtctaggctactgtttagccaagctggacccaccagcatgtctcttcaagctaaaaactggctgcctggaccttgctacagacagcagcgtctgtcaaagcaggcaaacgacaacaacaacagcaactttccctggactgcggctacaaagtatcatctaaatggtcgggactcgttggttaatccaggaccagctatggccagccacaaagacgatgaagaaaagtttttccccatgcatggaaccctgatatttggtaaacaaggaacaaatgctaacgacgcggatttggaacatgtcatgattacagatgaagaagaaatcaggaccaccaatcccgtggctacagagcagtacggaaacgtgtcaaataatttgcaaaactcaaatactggtccaactacagaaaatgtcaatcaccagggagcgttacctggtatggtgtggcaggatcgagacgtgtacctgcagggacccatttgggccaagattcctcacaccgacggacactttcacccttctccactgatgggaggttttggactcaaacacccgcctcctcaaatcatgatcaaaaacactcctgttccagccaatcctcctacaaacttcagcgcggcaaagtttgcttccttcatcacacagtattccacgggacaggtcagcgtggagatcgagtgggagctgcagaaggagaacagcaaacgctggaaccccgagatccagtacacttccaactacaacaaatctgttaatgtggactttactgtggacactaatggtgtgtattcagagcctcgccccattggcaccagatacctgactcgtaatctgtaa

SEQ ID NO: 4470 - DNA, 2208 bp, Artificial Sequence
  source: /note="Description of Artificial Sequence: Synthetic polynucleotide"
atggctgccgatggttatcttccagattggctcgaggacactctctctgaaggaataagacagtggtggaagctcaaacctggcccaccaccaccaaagcccgcagagcggcatcaggacgacagcaggggtcttgtgcttcctgggtacaagtacctcggacccttcaacggactcgacaaaggagagccggtcaacgaggcagacgctgcggccctcgagcacgacaaggcctacgaccggcagctcgacagcggagacaacccgtacctcaagtacaaccacgccgacgcggagtttcaggagcgtcttaaagaagatacgtcttttgggggcaacctcggacgagcagtcttccaggcgaaaaagagggttcttgaacctctgggcctggttgaggaacctgttaagacggctccgggaaaaaagaggccggtagagcactctcctgcggagccagactcctcctcgggaaccggaaaagcgggccagcagcctgcaagaaagagattgaatttcggtcagactggagacgcaggctccgtacctgacccccagcctctcggacagccaccagcagcccccacaagtttgggatctactacaatggctacaggcagtggcgcaccaatggcagacaataacgagggtgccgatggagtgggtaattcctcaggaaattggcattgcgattcccaatggctgggcgacagagtcatcaccaccagcacccgaacctgggccctgcccacctacaacaaccacctctacaagcaaatctccagccaatcaggagcatcgaacgacaaccactactttggctacagcaccccttgggggtattttgacttcaacagattccactgtcacttctccccacgtgactggcaaagactcatcaacaacaactggggattccgacccaagagactcaacttcaagctctttaacattcaagtcaaagaggtcacgcagaatgacggtacgacgacgattgccaataaccttaccagcacggttcaggtgtttactgactcggagtaccagctcccgtacgtcctcggctcggcgcatcaaggatgcctcccgccgtttccagcggacgtcttcatggtcccacagtatggatacctcaccctgaacaacgggagtcaggcggtaggacgctcttccttttactgcctggagtactttccttctcagatgctgcgtaccggaaacaactttaccttcagctacacctttgaggacgtgcctttccacagcagctacgctcacagccagagtttggaccggctgatgaatcctctgatcgaccagtatctgtattatctgaacaggacacaatcaaatagtggaactcttcagcagtctaggctactgtttagccaagctggacccaccagcatgtctcttcaagctaaaaactggctgcctggaccttgctacagacagcagcgtctgtcaaagcaggcaaacgacaacaacaacagcaactttccctggactgcggctacaaagtatcatctaaatggtcgggactcgttggttaatccaggaccagctatggccagccacaaagacgatgaagaaaagtttttccccatgcatggaaccctgatatttggtaaacaaggaacaaatgctaacgacgcggatttggaacatgtcatgattacagatgaagaagaaatcaggaccaccaatcccgtggctacagagcagtacggaaacgtgtcaaataatttgcaaaactcaaatactggtccaactacagaaaatgtcaatcaccagggagcgttacctggtatggtgtggcaggatcgagacgtgtacctgcagggacccatttgggccaagattcctcacaccgacggacactttcacccttctccactgatgggaggttttggactcaaacacccgcctcctcaaatcatgatcaaaaacactcctgttccagccaatcctcctacaaacttcagcgcggcaaagtttgcttccttcatcacacagtattccacgggacaggtcagcgtggagatcgagtgggagctgcagaaggagaacagcaaacgctggaaccccgagatccagtacacttccaactacaacaaatctgttaatgtggactttactgtggacactaatggtgtgtattcagagcctcgccccattggcaccagatacctgactcgtaatctgtaa

SEQ ID NO: 4471 - DNA, 2208 bp, Artificial Sequence
  source: /note="Description of Artificial Sequence: Synthetic polynucleotide"
atggctgccgatggttatcttccagattggctcgaggacactctctctgaaggaataagacagtggtggaagctcaaacctggcccaccaccaccaaagcccgcagagcggcatcaggacgacagcaggggtcttgtgcttcctgggtacaagtacctcggacccttcaacggactcgacaaaggagagccggtcaacgaggcagacgctgcggccctcgagcacgacaaggcctacgaccggcagctcgacagcggagacagcccgtacctcaagtacaaccacgccgacgcggagtttcaggagcgtcttaaagaagatacgtcttttgggggcaacctcggacgagcagtcttccaggcgaaaaagagggttcttgaacctctgggcctggttgaggaacctgttaagacggctccgggaaaaaagaggccggtagagcactctcctgcggagccagactcctcctcgggaaccggaaaagcgggccagcagcctgcaagaaagagattgaatttcggtcagactggagacgcagactccgtacctgacccccagcctctcggacagccaccagcagcccccacaagtttgggatctactacaatggctacaggcagtggcgcaccaatggcagacaataacgagggtgccgatggagtgggtaattcctcaggaaattggcattgcgattcccaatggctgggcgacagagtcatcaccaccagcacccgaacctgggccctgcccacctacaacaaccacctctacaagcaaatctccagccaatcaggagcatcgaacgacaaccactactttggctacagcaccccttgggggtattttgacttcaacagattccactgtcacttctccccacgtgactggcaaagactcatcaacaacaactggggattccgacccaagagactcaacttcaagctctttaacattcaagtcaaagaggtcacgcagaatgacggtacgacgacgattgccaataaccttaccagcacggttcaggtgtttactgactcggagtaccagctcccgtacgtcctcggctcggcgcatcaaggatgcctcccgccgtttccagcggacgtcttcatggtcccacagtatggatacctcaccctgaacaacgggagtcaggcggtaggacgctcttccttttactgcctggagtactttccttctcagatgctgcgtaccggaaacaactttaccttcagctacacctttgaggacgtgcctttccacagcagctacgctcacagccagagtttggaccggctgatgaatcctctgatcgaccagtatctgtattatctgaacaggacacaatcaaatagtggaactcttcagcagtctaggctactgtttagccaagctggacccaccagcatgtctcttcaagctaaaaactggctgcctggaccttgctacagacagcagcgtctgtcaaagcaggcaaacgacaacaacaacagcaactttccctggactgcggctacaaagtatcatctaaatggtcgggactcgttggttaatccaggaccagctatggccagccacaaagacgatgaagaaaagtttttccccatgcatggaaccctgatatttggtaaacaaggaacaaatgctaacgacgcggatttggaacatgtcatgattacagatgaagaagaaatcaggaccaccaatcccgtggctacagagcagtacggaaacgtgtcaaataatttgcaaaactcaaatactggtccaactacagaaaatgtcaatcaccagggagcgttacctggtatggtgtggcaggatcgagacgtgtacctgcagggacccatttgggccaagattcctcacaccgacggacactttcacccttctccactgatgggaggttttggactcaaacacccgcctcctcaaatcatgatcaaaaacactcctgttccagccaatcctcctacaaacttcagcgcggcaaagtttgcttccttcatcacacagtattccacgggacaggtcagcgtggagatcgagtgggagctgcagaaggagaacagcaaacgctggaaccccgagatccagtacacttccaactacaacaaatctgttaatgtggactttactgtggacactaatggtgtgtattcagagcctcgccccattggcaccagatacctgactcgtaatctgtaa

SEQ ID NO: 4472 - DNA, 2208 bp, Artificial Sequence
  source: /note="Description of Artificial Sequence: Synthetic polynucleotide"
atggctgccgatggttatcttccagattggctcgaggacactctctctgaaggaataagacagtggtggaagctcaaacctggcccaccaccaccaaagcccgcagagcggcatcaggacgacagcaggggtcttgtgcttcctgggtacaagtacctcggacccttcaacggactcgacaaaggagagccggtcaacgaggcagacgctgcggccctcgagcacgacaaggcctacgaccggcagctcgacagcggagacaacccgtacctcaagtacaaccacgccgacgcggagtttcaggagcgtcttaaagaagatacgtcttttgggggcaacctcggacgagcagtcttccaggcgaaaaagagggttcttgaacctctgggcctggttgaggaacctgttaagacggctccgggaaaaaagaggccggtagagcactctcctgcggagccagactcctcctcgggaaccggaaaagcgggccagcagcctgcaagaaagagattgaatttcggtcagactggagacgcagactccgtacctgacccccagcctctcggacagccaccagcagcccccacaagtttgggatctactacaatggctacaggcagtggcgcaccaatggcagacaataacgagggtgccgatggagtgggtaattcctcaggaaattggcattgcgattcccaatggctgggcgacagagtcatcaccaccagcacccgaacctgggccctgcccacctacaacaaccacctctacaagcaaatctccagccaatcaggagcatcgaacgacaaccactactttggctacagcaccccttgggggtattttgacttcaacagattccactgtcacttctccccacgtgactggcaaagactcatcaacaacaactggggattccgacccaagagactcaacttcaagctctttaacattcaagtcaaagaggtcacgcagaatgacggtacgacgacgattgccaataaccttaccagcacggttcaggtgtttactgactcggagtaccagctcccgtacgtcctcggctcggcgcatcaaggatgcctcccgccgtttccagcggacgtcttcatggtcccacagtatggatacctcaccctgaacaacgggagtcaggcggtaggacgctcttccttttactgcctggagtactttccttctcagatgctgcgtaccggaaacaactttaccttcagctacacctttgaggacgtgcctttccacagcagctacgctcacagccagagtttggaccggctgatgaatcctctgatcgaccagtatctgtattatctgaacaggacacaatcaaatagtggaactcttcagcagtctaggctactgtttagccaagctggacccaccagcatgtctcttcaagctaaaaactggctgcctggaccttgctacagacagcagcgtctgtcaaagcaggcaaacgacaacaacaacagcaactttccctggactgcggctacaaagtatcatctaaatggtcgggactcgttggttaatccaggaccagctatggccagccacaaagacgatgaagaaaagtttttccccatgcatggaaccctgatatttggtaaacaaggaacaaatgctaacgacgcggatttggaacatgtcatgattacagatgaagaagaaatcaggaccaccaatcccgtggctacagagcagtacggaaacgtgtcaaataatttgcaaaactcaaatactggtccaactacagaaaatgtcaatcaccagggagcgttacctggtatggtgtggcaggatcgagacgtgtacctgcagggacccatttgggccaagattcctcacaccgacggacactttcacccttctccactgatgggaggttttggactcaaacacccgcctcctcaaatcatgatcaaaaacactcctgttccagccaatcctcctacaaacttcagcgcggcaaagtttgcttccttcatcacacagtattccacgggacaggtcagcgtggagatcgagtgggagctgcagaaggagaacagcaaacgctggaaccccgagatccagtacacttccaactacaacaaatctgttaatgtggactttactgtggacactaatggtgtgtattcagagcctcgccccattggcaccagatacctgactcgtaatccgtaa

SEQ ID NO: 4473 - DNA, 2208 bp, Artificial Sequence
  source: /note="Description of Artificial Sequence: Synthetic polynucleotide"
atggctgccgatggttatcttccagattggctcgaggacactctctctgaaggaataagacagtggtggaagctcaaacctggcccaccaccaccaaagcccgcagagcggcatcaggacgacagcaggggtcttgtgcttcctgggtacaagtacctcggacccttcaacggactcgacaaaggagagccggtcaacgaggcagacgctgcggccctcgagcacgacaaggcctacgaccggcagctcgacagcggagacaacccgtacctcaagtacaaccacgccgacgcggagtttcaggagcgtcttaaagaagatacgtcttttgggggcaacctcggacgagcagtcttccaggcgaaaaagagggttcttgaacctctgggcctggttgaggaacctgttaagacggctccgggaaaaaagaggccggtagagcactctcctgcggagccagactcctcctcgggaaccggaaaagcgggccagcagcctgcaagaaagagattgaatttcggtcagactggagacgcagactccgtacctgacccccagcctctcggacagccaccagcagcccccacaagtttgggatctactacaatggctacaggcagtggcgcaccaatggcagacaataacgagggtgccgatggagtgggtaattcctcaggaaattggcattgcgattcccaatggctgggcgacagagtcatcaccaccagcacccgaacctgggccctgcccacctacaacaaccacctctacaagcaaatctccagccaatcaggagcatcgaacgacaaccactactttggctacagcaccccttgggggtattttgacttcaacagattccactgtcacttctccccacgtgactggcaaagactcatcaacaacaactggggattccgacccaagagactcaacttcaagctctttaacattcaagtcaaagaggtcacgcagaatgacggtacgacgacgattgccaataaccttaccagcacggttcaggtgtttactgactcggagtaccagctcccgtacgtcctcggctcggcgcatcaaggatgcctcccgccgtttccagcggacgtcttcatggtcccacagtatggatacctcaccctgaacaacgggagtcaggcggtaggacgctcttccttttactgcctggagtactttccttctcagatgctgcgtaccggaaacaactttaccttcagctacacctttgaggacgtgcctttccacagcagctacgctcacagccagagtttggaccggctgatgaatcctctgatcgaccagtatctgtattatctgaacaggacacaatcaaatagtggaactcttcagcagtctaggctactgtttagccaagctggacccaccagcatgtctcttcaagctaaaaactggctgcctggaccttgctacagacagcagcgtccgtcaaagcaggcaaacgacaacaacaacagcaactttccctggactgcggctacaaagtatcatctaaatggtcgggactcgttggttaatccaggaccagctatggccagccacaaagacgatgaagaaaagtttttccccatgcatggaaccctgatatttggtaaacaaggaacaaatgctaacgacgcggatttggaacatgtcatgattacagatgaagaagaaatcaggaccaccaatcccgtggctacagagcagtacggaaacgtgtcaaataatttgcaaaactcaaatactggtccaactacagaaaatgtcaatcaccagggagcgttacctggtatggtgtggcaggatcgagacgtgtacctgcagggacccatttgggccaagattcctcacaccgacggacactttcacccttctccactgatgggaggttttggactcaaacacccgcctcctcaaatcatgatcaaaaacactcctgttccagccaatcctcctacaaacttcagcgcggcaaagtttgcttccttcatcacacagtattccacgggacaggtcagcgtggagatcgagtgggagctgcagaaggagaacagcaaacgctggaaccccgagatccagtacacttccaactacaacaaatctgttaatgtggactttactgtggacactaatggtgtgtattcagagcctcgccccattggcaccagatacctgactcgtaatctgtaa

SEQ ID NO: 4474 - DNA, 2208 bp, Artificial Sequence
  source: /note="Description of Artificial Sequence: Synthetic polynucleotide"
atggctgccgatggttatcttccagattggctcgaggacactctctctgaaggaataagacagtggtggaagctcaaacctggcccaccaccaccaaagcccgcagagcggcatcaggacgacagcaggggtcttgtgcttcctgggtacaagtacctcggacccttcaacggactcgacaaaggagagccggtcaacgaggcagacgctgcggccctcgagcacgacaaggcctacgaccggcagctcgacagcggagacaacccgtacctcaagtacaaccacgccgacgcggagtttcaggagcgtcttaaagaagatacgtcttttgggggcaacctcggacgagcagtcttccaggcgaaaaagagggttcttgaacctctgggcctggttgaggaacctgttaagacggctccgggaaaaaagaggccggtagagcactctcctgcggagccagactcctcctcgggaaccggaaaagcgggccagcagcctgcaagaaagagattgaatttcagtcagactggagacgcagactccgtacctgacccccagcctctcggacagccaccagcagcccccacaagtttgggatctactacaatggctacaggcagtggcgcaccaatggcagacaataacgagggtgccgatggagtgggtaattcctcaggaaattggcattgcgattcccaatggctgggcgacagagtcatcaccaccagcacccgaacctgggccctgcccacctacaacaaccacctctacaagcaaatctccagccaatcaggagcatcgaacgacaaccactactttggctacagcaccccttgggggtattttgacttcaacagattccactgtcacttctccccacgtgactggcaaagactcatcaacaacaactggggattccgacccaagagactcaacttcaagctctttaacattcaagtcaaagaggtcacgcagaatgacggtacgacgacgattgccaataaccttaccagcacggttcaggtgtttactgactcggagtaccagctcccgtacgtcctcggctcggcgcatcaaggatgcctcccgccgtttccagcggacgtcttcatggtcccacagtatggatacctcaccctgaacaacgggagtcaggcggtaggacgctcttccttttactgcctggagtactttccttctcagatgctgcgtaccggaaacaactttaccttcagctacacctttgaggacgtgcctttccacagcagctacgctcacagccagagtttggaccggctgatgaatcctctgatcgaccagtatctgtattatctgaacaggacacaatcaaatagtggaactcttcagcagtctaggctactgtttagccaagctggacccaccagcatgtctcttcaagctaaaaactggctgcctggaccttgctacagacagcagcgtctgtcaaagcaggcaaacgacaacaacaacagcaactttccctggactgcggctacaaagtatcatctaaatggtcgggactcgttggttaatccaggaccagctatggccagccacaaagacgatgaagaaaagtttttccccatgcatggaaccctgatatttggtaaacaaggaacaaatgctaacgacgcggatttggaacatgtcatgattacagatgaagaagaaatcaggaccaccaatcccgtggctacagagcagtacggaaacgtgtcaaataatttgcaaaactcaaatactggtccaactacagaaaatgtcaatcaccagggagcgttacctggtatggtgtggcaggatcgagacgtgtacctgcagggacccatttgggccaagattcctcacaccgacggacactttcacccttctccactgatgggaggttttggactcaaacacccgcctcctcaaatcatgatcaaaaacactcctgttccagccaatcctcctacaaacttcagcgcggcaaagtttgcttccttcatcacacagtattccacgggacaggtcagcgtggagatcgagtgggagctgcagaaggagaacagcaaacgctggaaccccgagatccagtacacttccaactacaacaaatctgttaatgtggactttactgtggacactaatggtgtgtattcagagcctcgccccattggcaccagatacctgactcgtaatctgtaa

SEQ ID NO: 4475 - DNA, 2208 bp, Artificial Sequence
  source: /note="Description of Artificial Sequence: Synthetic polynucleotide"
atggctgccgatggttatcttccagattggctcgaggacactctctctgaaggaataagacagtggtggaagctcaaacctggcccaccaccaccaaagcccgcagagcggcatcaggacgacagcaggggtcttgtgcttcctgggtacaagtacctcggacccttcaacggactcgacaaaggagagccggtcaacgaggcagacgctgcggccctcgagcacgacaaggcctacgaccggcagctcgacagcggagacaacccgtacctcaagtacaaccacgccgacgcggagtttcaggagcgtcttaaagaagatacgtcttttgggggcaacctcggacgagcagtcttccaggcgaaaaagagggttcttgaacctctgggcctggttgaggaacctgttaagacggctccgggaaaaaagaggccggtagagcactctcctgcggagccagactcctcctcgggaaccggaaaagcgggccagcagcctgcaagaaagagattgaatttcggtcagactggagacgcagactccgtacctgacccccagcctctcggacagccaccagcagcccccacaagtttgggatctactacaatggctacaggcagtggcgcaccaatggcagacaataacgagggtgccgatggagtgggtaattcctcaggaaattggcattgcgattcccaatggctgggcgacagagtcatcaccaccagcacccgaacctgggccctgcccacctacaacaaccacctctacaagcaaatctccagccaatcaggagcatcgaacgacaaccactactttggctacagcaccccttgggggtattttgacttcaacagattccactgtcacttctccccacgtgactggcaaagactcatcaacaacaactggggattccgacccaagagactcaacttcaagctctttaacattcaagtcaaagaggtcacgcagaatgacggtacgacgacgattgccaataaccttaccagcacggttcaggtgtttactgactcggagtaccagctcccgtacgtcctcggctcggcgcatcaaggatgcctcccgccgtttccagcggacgtcttcatggtcccacagtatggatacctcaccctgaacaacgggagtcaggcggtaggacgctcttccttttactgcctggagtactttccttctcagatgctgcgtaccggaaacaactttaccttcagctacacctttgaggacgtgcctttccacagcagctacgctcacagccagagtttggaccggctgatgaatcctctgatcgaccagtatctgtattatctgaacaggacacaatcaaatagtggaactcttcagcagtctaggctactgtttagccaagctggacccaccagcatgtctcttcaagctaaaaactggctgcctggaccttgctacagacagcagcgtctgtcaaagcaggcaaacgacaacaacaacagcaactttccctggactgcggctacaaagtatcatctaaatggtcgggactcgttggttaatccaggaccagctatggccagccacaaagacgatgaagaaaagtttttccccatgcatggaaccctgatatttggtaaacaaggaacaaatgctaacgacgcggatttggaacatgtcatgattacagatgaagaagaaatcaggaccaccaatcccgtggctacagagcagtacggaaacgtgtcaaataatttgcaaaactcaaatactggtccaactacagaaaatgtcaatcaccagggagcgttacctggtatggtgtggcaggatcgagacgtgtacctgcagggacccatttgggccaagattcctcacaccgacggacactttcacccttctccactgatgggaggttttggactcaaacacccgcctcctcaaatcatgatcaaaaacactcctgttccagccaatcctcctacaaacttcagcgcggcaaagtttgcttccttcatcacacagtattccacgggacaggtcagcgtggagatcgagtgggagccgcagaaggagaacagcaaacgctggaaccccgagatccagtacacttccaactacaacaaatctgttaatgtggactttactgtggacactaatggtgtgtattcagagcctcgccccattggcaccagatacctgactcgtaatctgtaa

SEQ ID NO: 4476 - DNA, 2208 bp, Artificial Sequence
  source: /note="Description of Artificial Sequence: Synthetic polynucleotide"
atggctgccgatggttatcttccagattggctcgaggacactctctctgaaggaataagacagtggtggaagctcaaacctggcccaccaccaccaaagcccgcagagcggcatcaggacgacagcaggggtcttgtgcttcctgggtacaagtacctcggacccttcaacggactcgacaaaggagagccggtcaacgaggcagacgctgcggccctcgagcacgacaaggcctacgaccggcagctcgacagcggagacaacccgtacctcaagtacaaccacgccgacgcggagtttcaggagcgtcttaaagaagatacgtcttttgggggcaacctcggacgagcagtcttccaggcgaaaaagagggttcttgaacctctgggcctggttgaggaacctgttaagacggctccgggaaaaaagaggccggtagagcactctcctgcggagccagactcctcctcgggaaccggaaaagcgggccagcagcctgcaagaaagagattgaatttcggtcagactggagacgcagactccgtacctgacccccagcctctcggacagccaccagcagcccccacaagtttgggatctactacaatggctacaggcagtggcgcaccaatggcagacaataacgagggtgccgatggagtgggtaattcctcaggaaattggcattgcgattcccaatggctgggcgacagagtcatcaccaccagcacccgaacctgggccctgcccacctacaacaaccacctctacaagcaaatctccagccaatcaggagcatcgaacgacaaccactactttggctacagcaccccttgggggtattttgacttcaacagattccactgtcacttctccccacgtgactggcaaagactcatcaacaacaactggggattccgacccaagagacccaacttcaagctctttaacattcaagtcaaagaggtcacgcagaatgacggtacgacgacgattgccaataaccttaccagcacggttcaggtgtttactgactcggagtaccagctcccgtacgtcctcggctcggcgcatcaaggatgcctcccgccgtttccagcggacgtcttcatggtcccacagtatggatacctcaccctgaacaacgggagtcaggcggtaggacgctcttccttttactgcctggagtactttccttctcagatgctgcgtaccggaaacaactttaccttcagctacacctttgaggacgtgcctttccacagcagctacgctcacagccagagtttggaccggctgatgaatcctctgatcgaccagtatctgtattatctgaacaggacacaatcaaatagtggaactcttcagcagtctaggctactgtttagccaagctggacccaccagcatgtctcttcaagctaaaaactggctgcctggaccttgctacagacagcagcgtctgtcaaagcaggcaaacgacaacaacaacagcaactttccctggactgcggctacaaagtatcatctaaatggtcgggactcgttggttaatccaggaccagctatggccagccacaaagacgatgaagaaaagtttttccccatgcatggaaccctgatatttggtaaacaaggaacaaatgctaacgacgcggatttggaacatgtcatgattacagatgaagaagaaatcaggaccaccaatcccgtggctacagagcagtacggaaacgtgtcaaataatttgcaaaactcaaatactggtccaactacagaaaatgtcaatcaccagggagcgttacctggtatggtgtggcaggatcgagacgtgtacctgcagggacccatttgggccaagattcctcacaccgacggacactttcacccttctccactgatgggaggttttggactcaaacacccgcctcctcaaatcatgatcaaaaacactcctgttccagccaatcctcctacaaacttcagcgcggcaaagtttgcttccttcatcacacagtattccacgggacaggtcagcgtggagatcgagtgggagctgcagaaggagaacagcaaacgctggaaccccgagatccagtacacttccaactacaacaaatctgttaatgtggactttactgtggacactaatggtgtgtattcagagcctcgccccattggcaccagatacctgactcgtaatctgtaa

SEQ ID NO: 4477 - DNA, 2208 bp, Artificial Sequence
  source: /note="Description of Artificial Sequence: Synthetic polynucleotide"
atggctgccgatggttatcttccagattggctcgaggacactctctctgaaggaataagacagtggtggaagctcaaacctggcccaccaccaccaaagcccgcagagcggcatcaggacgacagcaggggtcttgtgcttcctgggtacaagtacctcggacccttcaacggactcgacaaaggagagccggtcaacgaggcagacgctgcggccctcgagcacgacaaggcctacgaccggcagctcgacagcggagacaacccgtacctcaagtacaaccacgccgacgcggagtttcaggagcgtcttaaagaagatacgtcttttgggggcaacctcggacgagcagtcttccaggcgaaaaagagggttcttgaacctctgggcctggttgaggaacctgttaagacggctccgggaaaaaagaggccggtagagcactctcctgcggagccagactcctcctcgggaaccggaaaagcgggccagcagcctgcaagaaagagattgaatttcggtcagactggagacgcagactccgtacctgacccccagcctctcggacagccaccagcagcccccacaagtttgggatctactacaatggctacaggcagtggcgcaccaatggcagacaataacgagggtgccgatggagtgggtaattcctcaggaaattggcattgcgattcccaatggctgggcgacagagtcatcaccaccagcacccgaacctgggccctgcccacctacaacaaccacctctacaagcaaatctccagccaatcaggagcatcgaacgacaaccactactttggctacagcaccccttgggggtattttgacttcaacagattccactgtcacttctccccacgtgactggcaaagactcatcaacaacaactggggattccgacccaagagactcaacttcaagctctttaacattcaagtcaaagaggtcacgcagaatgacggtacgacgacgattgccaataaccttaccagcacggttcaggtgtttactgactcggagtaccagctcccgtacgtcctcggctcggcgcatcaaggatgcctcccgccgtttccagcggacgtcttcatggtcccacagtatggatacctcaccctgaacaacgggagtcaggcggtaggacgctcttccttttactgcctggagtactttccttctcagatgctgcgtaccggaaacaactttaccttcagctacacctttgaggacgtgcctttccacagcagctacgctcacagccagagtttggaccggctgatgaatcctctgatcgaccagtatctgtattatctgaacaggacacaatcaaatagtggaactcttcagcagtctaggctactgtttagccaagctggacccaccagcatgtctcttcaagctaaaaactggctgcctggaccttgctacagacagcagcgtctgtcaaagcaggcaaacgacaacaacaacagcaactttccctggactgcggctacaaagtatcatctaaatggtcgggactcgttggttaatccaggaccagctatggccagccacaaagacgatgaagaaaagtttttccccatgcatggaaccctgatatttggtaaacaaggaacaaatgctaacgacgcggatttggaacatgtcgtgattacagatgaagaagaaatcaggaccaccaatcccgtggctacagagcagtacggaaacgtgtcaaataatttgcaaaactcaaatactggtccaactacagaaaatgtcaatcaccagggagcgttacctggtatggtgtggcaggatcgagacgtgtacctgcagggacccatttgggccaagattcctcacaccgacggacactttcacccttctccactgatgggaggttttggactcaaacacccgcctcctcaaatcatgatcaaaaacactcctgttccagccaatcctcctacaaacttcagcgcggcaaagtttgcttccttcatcacacagtattccacgggacaggtcagcgtggagatcgagtgggagctgcagaaggagaacagcaaacgctggaaccccgagatccagtacacttccaactacaacaaatctgttaatgtggactttactgtggacactaatggtgtgtattcagagcctcgccccattggcaccagatacctgactcgtaatctgtaa

SEQ ID NO: 4478 - DNA, 2208 bp, Artificial Sequence
  source: /note="Description of Artificial Sequence: Synthetic polynucleotide"
atggctgccgatggttatcttccagattggctcgaggacactctctctgaaggaataagacagtggtggaagctcaaacctggcccaccaccaccaaagcccgcagagcggcatcaggacgacagcaggggtcttgtgcttcctgggtacaagtacctcggacccttcaacggactcgacaaaggagagccggtcaacgaggcagacgctgcggccctcgagcacgacaaggcctacgaccggcagctcgacagcggagacaacccgtacctcaagtacaaccacgccgacgcggagtttcaggagcgtcttaaagaagatacgtcttttgggggcaacctcggacgagcagtcttccaggcgaaaaagagggttcttgaacctctgggcctggttgaggaacctgttaagacggctccgggaaaaaagaggccggtagagcactctcctgcggagccagactcctcctcgggaaccggaaaagcgggccagcagcctgcaagaaagagattgaatttcggtcagactggagacgcagactccgtacctgacccccagcctctcggacagccaccagcagcccccacaagtttgggatctactacaatggctacaggcagtggcgcaccaatggcagacaataacgagggtgccgatggagtgggtaattcctcaggaaattggcattgcgattcccaatggctgggcgacagagtcatcaccaccagcacccgaacctgggccctgcccacctacaacaaccacctctacaagcaaatctccagccaatcaggagcatcgaacgacaaccactactttggctacagcaccccttgggggtattttgacttcaacagattccactgtcacttctccccacgtgactggcaaagactcatcaacaacaactggggattccgacccaagagactcaacttcaagctctttaacattcaagtcaaagaggtcacgcagaatgacggtacgacgacgattgccaataaccttaccagcacggttcaggtgtttactgactcggagtaccagctcccgtacgtcctcggctcggcgcatcaaggatgcctcccgccgtttccagcggacgtcttcatggtcccacagtatggatacctcaccctgaacaacgggagtcaggcggtaggacgctcttccttttactgcctggagtactttccttctcagatgctgcgtaccggaaacaactttaccttcagctacacctttgaggacgtgcctttccacagcagctacgctcacagccagagtttggaccggctgatgaatcctctgatcgaccagtatctgtattatctgaacaggacacaatcaaatagtggaactcttcagcagtctaggctactgtttagccaagctggacccaccagcatgtctcttcaagctaaaaactggctgcctggaccttgctacagacagcagcgtctgtcaaagcaggcaaacgacaacaacaacagcaactttccctggactgcggctacaaagtatcatctaaatggtcgggactcgttggttaatccaggaccagctatggccagccacaaagacgatgaagaaaagtttttccccatgcatggaaccctgatatttggtaaacaaggaacaaatgctaacgacgcggatttggaacatgtcatgattacagatgaagaagaaatcaggaccaccaatcccgtggctacagagcagtacggaaacgtgtcaaataatttgcaaaactcaaatactggtccaactacagaaaatgtcaatcaccagggagcgttacctggtatggtgtggcgggatcgagacgtgtacctgcagggacccatttgggccaagattcctcacaccgacggacactttcacccttctccactgatgggaggttttggactcaaacacccgcctcctcaaatcatgatcaaaaacactcctgttccagccaatcctcctacaaacttcagcgcggcaaagtttgcttccttcatcacacagtattccacgggacaggtcagcgtggagatcgagtgggagctgcagaaggagaacagcaaacgctggaaccccgagatccagtacacttccaactacaacaaatctgttaatgtggactttactgtggacactaatggtgtgtattcagagcctcgccccattggcaccagatacctgactcgtaatctgtaa

SEQ ID NO: 4479 - DNA, 2208 bp, Artificial Sequence
  source: /note="Description of Artificial Sequence: Synthetic polynucleotide"
atggctgccgatggttatcttccagattggctcgaggacactctctctgaaggaataagacagtggtggaagctcaaacctggcccaccaccaccaaagcccgcagagcggcatcaggacgacagcaggggtcttgtgcttcctgggtacaagtacctcggacccttcaacggactcgacaaaggagagccggtcaacgaggcagacgctgcggccctcgagcacgacaaggcctacgaccggcagctcgacagcggagacaacccgtacctcaagtacaaccacgccgacgcggagtttcaggagcgtcttaaagaagatacgtcttttgggggcaacctcggacgagcagtcttccaggcgaaaaagagggttcttgaacctctgggcctggttgaggaacctgttaagacggctccgggaaaaaagaggccggtagagcactctcctgcggagccagactcctcctcgggaaccggaaaagcgggccagcagcctgcaagaaagagattgaatttcggtcagactggaggcgcagactccgtacctgacccccagcctctcggacagccaccagcagcccccacaagtttgggatctactacaatggctacaggcagtggcgcaccaatggcagacaataacgagggtgccgatggagtgggtaattcctcaggaaattggcattgcgattcccaatggctgggcgacagagtcatcaccaccagcacccgaacctgggccctgcccacctacaacaaccacctctacaagcaaatctccagccaatcaggagcatcgaacgacaaccactactttggctacagcaccccttgggggtattttgacttcaacagattccactgtcacttctccccacgtgactggcaaagactcatcaacaacaactggggattccgacccaagagactcaacttcaagctctttaacattcaagtcaaagaggtcacgcagaatgacggtacgacgacgattgccaataaccttaccagcacggttcaggtgtttactgactcggagtaccagctcccgtacgtcctcggctcggcgcatcaaggatgcctcccgccgtttccagcggacgtcttcatggtcccacagtatggatacctcaccctgaacaacgggagtcaggcggtaggacgctcttccttttactgcctggagtactttccttctcagatgctgcgtaccggaaacaactttaccttcagctacacctttgaggacgtgcctttccacagcagctacgctcacagccagagtttggaccggctgatgaatcctctgatcgaccagtatctgtattatctgaacaggacacaatcaaatagtggaactcttcagcagtctaggctactgtttagccaagctggacccaccagcatgtctcttcaagctaaaaactggctgcctggaccttgctacagacagcagcgtctgtcaaagcaggcaaacgacaacaacaacagcaactttccctggactgcggctacaaagtatcatctaaatggtcgggactcgttggttaatccaggaccagctatggccagccacaaagacgatgaagaaaagtttttccccatgcatggaaccctgatatttggtaaacaaggaacaaatgctaacgacgcggatttggaacatgtcatgattacagatgaagaagaaatcaggaccaccaatcccgtggctacagagcagtacggaaacgtgtcaaataatttgcaaaactcaaatactggtccaactacagaaaatgtcaatcaccagggagcgttacctggtatggtgtggcaggatcgagacgtgtacctgcagggacccatttgggccaagattcctcacaccgacggacactttcacccttctccactgatgggaggttttggactcaaacacccgcctcctcaaatcatgatcaaaaacactcctgttccagccaatcctcctacaaacttcagcgcggcaaagtttgcttccttcatcacacagtattccacgggacaggtcagcgtggagatcgagtgggagctgcagaaggagaacagcaaacgctggaaccccgagatccagtacacttccaactacaacaaatctgttaatgtggactttactgtggacactaatggtgtgtattcagagcctcgccccattggcaccagatacctgactcgtaatctgtaa

SEQ ID NO: 4480 - DNA, 2208 bp, Artificial Sequence
  source: /note="Description of Artificial Sequence: Synthetic polynucleotide"
atggctgccgatggttatcttccagattggctcgaggacactctctctgaaggaataagacagtggtggaagctcaaacctggcccaccaccaccaaagcccgcagagcggcatcaggacgacagcaggggtcttgtgcttcctgggtacaagtacctcggacccttcaacggactcgacaaaggagagccggtcaacgaggcagacgctgcggccctcgagcacgacaaggcctacgaccggcagctcgacagcggagacaacccgtacctcaagtacaaccacgccgacgcggagtttcaggagcgtcttaaagaagatacgtcttttgggggcaacctcggacgagcagtcttccaggcgaaaaagagggttcttgaacctctgggcctggttgaggaacctgttaagacggctccgggaaaaaagaggccggtagagcactctcctgcggagccagactcctcctcgggaaccggaaaagcgggccagcagcctgcaagaaagagattgaatttcggtcagactggagacgcagactccgtacctgacccccagcctctcggacagccaccagcagcccccacaagtttgggatctactacaatggctacaggcagtggcgcaccaatggcagacaataacgagggtaccgatggagtgggtaattcctcaggaaattggcattgcgattcccaatggctgggcgacagagtcatcaccaccagcacccgaacctgggccctgcccacctacaacaaccacctctacaagcaaatctccagccaatcaggagcatcgaacgacaaccactactttggctacagcaccccttgggggtattttgacttcaacagattccactgtcacttctccccacgtgactggcaaagactcatcaacaacaactggggattccgacccaagagactcaacttcaagctctttaacattcaagtcaaagaggtcacgcagaatgacggtacgacgacgattgccaataaccttaccagcacggttcaggtgtttactgactcggagtaccagctcccgtacgtcctcggctcggcgcatcaaggatgcctcccgccgtttccagcggacgtcttcatggtcccacagtatggatacctcaccctgaacaacgggagtcaggcggtaggacgctcttccttttactgcctggagtactttccttctcagatgctgcgtaccggaaacaactttaccttcagctacacctttgaggacgtgcctttccacagcagctacgctcacagccagagtttggaccggctgatgaatcctctgatcgaccagtatctgtattatctgaacaggacacaatcaaatagtggaactcttcagcagtctaggctactgtttagccaagctggacccaccagcatgtctcttcaagctaaaaactggctgcctggaccttgctacagacagcagcgtctgtcaaagcaggcaaacgacaacaacaacagcaactttccctggactgcggctacaaagtatcatctaaatggtcgggactcgttggttaatccaggaccagctatggccagccacaaagacgatgaagaaaagtttttccccatgcatggaaccctgatatttggtaaacaaggaacaaatgctaacgacgcggatttggaacatgtcatgattacagatgaagaagaaatcaggaccaccaatcccgtggctacagagcagtacggaaacgtgtcaaataatttgcaaaactcaaatactggtccaactacagaaaatgtcaatcaccagggagcgttacctggtatggtgtggcaggatcgagacgtgtacctgcagggacccatttgggccaagattcctcacaccgacggacactttcacccttctccactgatgggaggttttggactcaaacacccgcctcctcaaatcatgatcaaaaacactcctgttccagccaatcctcctacaaacttcagcgcggcaaagtttgcttccttcatcacacagtattccacgggacaggtcagcgtggagatcgagtgggagctgcagaaggagaacagcaaacgctggaaccccgagatccagtacacttccaactacaacaaatctgttaatgtggactttactgtggacactaatggtgtgtattcagagcctcgccccattggcaccagatacctgactcgtaatctgtaa

SEQ ID NO: 4481 - DNA, 2208 bp, Artificial Sequence
  source: /note="Description of Artificial Sequence: Synthetic polynucleotide"
atggctgccgatggttatcttccagattggctcgaggacactctctctgaaggaataagacagtggtggaagctcaaacctggcccaccaccaccaaagcccgcagagcggcatcaggacgacagcaggggtcttgtgcttcctgggtacaagtacctcggacccttcaacggactcgacaaaggagagccggtcaacgaggcagacgctgcggccctcgagcacgacaaggcctacgaccggcagctcgacagcggagacaacccgtaccccaagtacaaccacgccgacgcggagtttcaggagcgtcttaaagaagatacgtcttttgggggcaacctcggacgagcagtcttccaggcgaaaaagagggttcttgaacctctgggcctggttgaggaacctgttaagacggctccgggaaaaaagaggccggtagagcactctcctgcggagccagactcctcctcgggaaccggaaaagcgggccagcagcctgcaagaaagagattgaatttcggtcagactggagacgcagactccgtacctgacccccagcctctcggacagccaccagcagcccccacaagtttgggatctactacaatggctacaggcagtggcgcaccaatggcagacaataacgagggtgccgatggagtgggtaattcctcaggaaattggcattgcgattcccaatggctgggcgacagagtcatcaccaccagcacccgaacctgggccctgcccacctacaacaaccacctctacaagcaaatctccagccaatcaggagcatcgaacgacaaccactactttggctacagcaccccttgggggtattttgacttcaacagattccactgtcacttctccccacgtgactggcaaagactcatcaacaacaactggggattccgacccaagagactcaacttcaagctctttaacattcaagtcaaagaggtcacgcagaatgacggtacgacgacgattgccaataaccttaccagcacggttcaggtgtttactgactcggagtaccagctcccgtacgtcctcggctcggcgcatcaaggatgcctcccgccgtttccagcggacgtcttcatggtcccacagtatggatacctcaccctgaacaacgggagtcaggcggtaggacgctcttccttttactgcctggagtactttccttctcagatgctgcgtaccggaaacaactttaccttcagctacacctttgaggacgtgcctttccacagcagctacgctcacagccagagtttggaccggctgatgaatcctctgatcgaccagtatctgtattatctgaacaggacacaatcaaatagtggaactcttcagcagtctaggctactgtttagccaagctggacccaccagcatgtctcttcaagctaaaaactggctgcctggaccttgctacagacagcagcgtctgtcaaagcaggcaaacgacaacaacaacagcaactttccctggactgcggctacaaagtatcatctaaatggtcgggactcgttggttaatccaggaccagctatggccagccacaaagacgatgaagaaaagtttttccccatgcatggaaccctgatatttggtaaacaaggaacaaatgctaacgacgcggatttggaacatgtcatgattacagatgaagaagaaatcaggaccaccaatcccgtggctacagagcagtacggaaacgtgtcaaataatttgcaaaactcaaatactggtccaactacagaaaatgtcaatcaccagggagcgttacctggtatggtgtggcaggatcgagacgtgtacctgcagggacccatttgggccaagattcctcacaccgacggacactttcacccttctccactgatgggaggttttggactcaaacacccgcctcctcaaatcatgatcaaaaacactcctgttccagccaatcctcctacaaacttcagcgcggcaaagtttgcttccttcatcacacagtattccacgggacaggtcagcgtggagatcgagtgggagctgcagaaggagaacagcaaacgctggaaccccgagatccagtacacttccaactacaacaaatctgttaatgtggactttactgtggacactaatggtgtgtattcagagcctcgccccattggcaccagatacctgactcgtaatctgtaa

SEQ ID NO: 4482 - DNA, 2208 bp, Artificial Sequence
  source: /note="Description of Artificial Sequence: Synthetic polynucleotide"
atggctgccgatggttatcttccagattggctcgaggacactctctctgaaggaataagacagtggtggaagctcaaacctggcccaccaccaccaaagcccgcagagcggcatcaggacgacagcaggggtcttgtgcttcctgggtacaagtacctcggacccttcaacggactcgacaaaggagagccggtcaacgaggcagacgctgcggccctcgagcacgacaaggcctacgaccggcagctcgacagcggagacaacccgtacctcaagtacaaccacgccgacgcggagtttcaggagcgtcttaaagaagatacgtcttttgggggcaacctcggacgagcagtcttccaggcgaaaaagagggttcttgaacctctgggcctggttgaggaacctgttaagacggctccgggaaaaaagaggccggtagagcactctcctgcggagccagactcctcctcgggaaccggaaaagcgggccagcagcctgcaagaaagagattgaatttcggtcagactggagacgcagactccgtacctgacccccagcctctcggacagccaccagcagcccccacaagtttgggatctactacaatggctacaggcagtggcgcaccaatggcagacaataacgagggtgccgatggagtgggtaattcctcaggaaattggcattgcgattcccaatggctgggcgacagagtcatcaccaccagcacccgaacctgggccctgcccacctacaacaaccacctctacaagcaaatctccagccaatcaggagcatcgaacgacaaccactactttggctacagcaccccttgggggtattttgacttcaacagattccactgtcacttctccccacgtgactggcaaagactcatcaacaacaactggggattccgacccaagagactcaacttcaagctctttaacattcaagtcaaagaggtcacgcagaatgacggtacgacgacgattgccaataaccttaccagcacggttcaggtgtttactgactcggagtaccagctcccgtacgtcctcggctcggcgcatcaaggatgcctcccgccgtttccagcggacgtcttcatggtcccacagtatggatacctcaccctgaacaacgggagtcaggcggtaggacgctcttccttttactgcctggagtactttccttctcagatgctgcgtaccggaaacaactttaccttcagctacacctttgaggacgtgcctttccacagcagctacgctcacagccagagtttggaccggctgatgaatcctctgatcgaccagtatctgtattatctgaacaggacacaatcaaatagtggaactcttcagcagtctaggctactgtttagccaagctggacccaccagcatgtctcttcaagctaaaaactggctgcctggaccttgctacagacagcagcgtctgtcaaagcaggcaaacgacaacaacaacagcaactttccctggactgcggctacaaagtatcatctaaatggtcgggactcgttggttaatccaggaccagctatggccagccacaaagacgatgaagaaaagtttttccccatgcatggaaccctgatatttggtaaacaaggaacaaatgctaacgacgcggatttggaacatgtcatgattacagatgaagaagaaatcagggccaccaatcccgtggctacagagcagtacggaaacgtgtcaaataatttgcaaaactcaaatactggtccaactacagaaaatgtcaatcaccagggagcgttacctggtatggtgtggcaggatcgagacgtgtacctgcagggacccatttgggccaagattcctcacaccgacggacactttcacccttctccactgatgggaggttttggactcaaacacccgcctcctcaaatcatgatcaaaaacactcctgttccagccaatcctcctacaaacttcagcgcggcaaagtttgcttccttcatcacacagtattccacgggacaggtcagcgtggagatcgagtgggagctgcagaaggagaacagcaaacgctggaaccccgagatccagtacacttccaactacaacaaatctgttaatgtggactttactgtggacactaatggtgtgtattcagagcctcgccccattggcaccagatacctgactcgtaatctgtaa

SEQ ID NO: 4483 - DNA, 2208 bp, Artificial Sequence
  source: /note="Description of Artificial Sequence: Synthetic polynucleotide"
atggctgccgatggttatcttccagattggctcgaggacactctctctgaaggaataagacagtggtggaagctcaaacctggcccaccaccaccaaagcccgcagagcggcatcaggacgacagcaggggtcttgtgcttcctgggtacaagtacctcggacccttcaacggactcgacaaaggagagccggtcaacgaggcagacgctgcggccctcgagcacgacaaggcctacgaccggcagctcgacagcggagacaacccgtacctcaagtacaaccacgccgacgcggagtttcaggagcgtcttaaagaagatacgtcttttgggggcaacctcggacgagcagtcttccaggcgaaaaagagggttcttgaacctctgggcctggttgaggaacctgttaagacggctccgggaaaaaagaggccggtagagcactctcctgcggagccagactcctcctcgggaaccggaaaagcgggccagcagcctgcaagaaagagattgaatttcggtcagactggagacgcagactccgtacctgacccccagcctctcggacagccaccagcagcccccacaagtttgggatctactacaatggctacaggcagtggcgcaccaatggcagacaataacgagggtgccgatggagtgggtaattcctcaggaaattggcattgcgattcccaatggctgggcgacagagtcatcaccaccagcacccgaacctgggccctgcccacctacaacaaccacctctacaagcaaatctccagccaatcaggagcatcgaacgacaaccactactttggctacagcaccccttgggggtattttgacttcaacagattccactgtcgcttctccccacgtgactggcaaagactcatcaacaacaactggggattccgacccaagagactcaacttcaagctctttaacattcaagtcaaagaggtcacgcagaatgacggtacgacgacgattgccaataaccttaccagcacggttcaggtgtttactgactcggagtaccagctcccgtacgtcctcggctcggcgcatcaaggatgcctcccgccgtttccagcggacgtcttcatggtcccacagtatggatacctcaccctgaacaacgggagtcaggcggtaggacgctcttccttttactgcctggagtactttccttctcagatgctgcgtaccggaaacaactttaccttcagctacacctttgaggacgtgcctttccacagcagctacgctcacagccagagtttggaccggctgatgaatcctctgatcgaccagtatctgtattatctgaacaggacacaatcaaatagtggaactcttcagcagtctaggctactgtttagccaagctggacccaccagcatgtctcttcaagctaaaaactggctgcctggaccttgctacagacagcagcgtctgtcaaagcaggcaaacgacaacaacaacagcaactttccctggactgcggctacaaagtatcatctaaatggtcgggactcgttggttaatccaggaccagctatggccagccacaaagacgatgaagaaaagtttttccccatgcatggaaccctgatatttggtaaacaaggaacgaatgctaacgacgcggatttggaacatgtcatgattacagatgaagaagaaatcaggaccaccaatcccgtggctacagagcagtacggaaacgtgtcaaataatttgcaaaactcaaatactggtccaactacagaaaatgtcaatcaccagggagcgttacctggtatggtgtggcaggatcgagacgtgtacctgcagggacccatttgggccaagattcctcacaccgacggacactttcacccttctccactgatgggaggttttggactcaaacacccgcctcctcaaatcatgatcaaaaacactcctgttccagccaatcctcctacaaacttcagcgcggcaaagtttgcttccttcatcacacagtattccacgggacaggtcagcgtggagatcgagtgggagctgcagaaggagaacagcaaacgctggaaccccgagatccagtacacttccaactacaacaaatctgttaatgtggactttactgtggacactaatggtgtgtattcagagcctcgccccattggcaccagatacctgactcgtaatctgtaa

SEQ ID NO: 4484 - DNA, 2208 bp, Artificial Sequence
  source: /note="Description of Artificial Sequence: Synthetic polynucleotide"
atggctgccgatggttatcttccagattggctcgaggacactctctctgaaggaataagacagtggtggaagctcaaacctggcccaccaccaccaaagcccgcagagcggcatcaggacgacagcaggggtcttgtgcttcctgggtacaagtacctcggacccttcaacggactcgacaaaggagagccggtcaacgaggcagacgctgcggccctcgagcacgacaaggcctacgaccggcagctcgacagcggagacaacccgtacctcaagtacaaccacgccgacgcggagtttcaggagcgtcttaaagaagatacgtcttttgggggcaacctcggacgagcagtcttccaggcgaaaaagagggttcttgaacctctgggcctggttgaggaacctgttaagacggctccgggaaaaaagaggccggtagagcactctcctgcggagccagactcctcctcgggaaccggaaaagcgggccagcagcctgcaagaaagagattgaatttcggtcagactggagacgcagactccgtacctgacccccagcctctcggacagccaccagcagcccccacaagtttgggatctactacaatggctacaggcagtggcgcaccaatggcagacaataacgagggtgccgatggagtgggtaattcctcaggaaattggcattgcgattcccaatggctgggcgacagagtcatcaccaccagcacccgaacctgggccctgcccacctacaacaaccacctctacaagcaaatctccagccaatcaggagcatcgaacgacaaccactactttggctacagcaccccttgggggtattttgacttcaacagattccactgtcacttctccccacgtgactggcaaagactcatcaacaacaactggggattccgacccaagagactcaacttcaagctctttaacattcaagtcaaagaggtcacgcagaatgacggtacgacgacgattgccaataaccttaccagcacggttcaggtgtttactgactcggagtaccagctcccgtacgtcctcggctcggcgcatcaaggatgcctcccgccgtttccagcggacgtcttcatggtcccacagtatggatacctcaccctgaacaacgggagtcaggcggtaggacgctcttccttttactgcctggagtactttccttctcagatgctgcgtaccggaaacaactttaccttcagctacacctttgaggacgtgcctttccgcagcagctacgctcacagccagagtttggaccggctgatgaatcctctgatcgaccagtatctgtattatctgaacaggacacaatcaaatagtggaactcttcagcagtctaggctactgtttagccaagctggacccaccagcatgtctcttcaagctaaaaactggctgcctggaccttgctacagacagcagcgtctgtcaaagcaggcaaacgacaacaacaacagcaactttccctggactgcggctacaaagtatcatctaaatggtcgggactcgttggttaatccaggaccagctatggccagccacaaagacgatgaagaaaagtttttccccatgcatggaaccctgatatttggtaaacaaggaacaaatgctaacgacgcggatttggaacatgtcatgattacagatgaagaagaaatcaggaccaccaatcccgtggctacagagcagtacggaaacgtgtcaaataatttgcaaaactcaaatactggtccaactacagaaaatgtcaatcaccagggagcgttacctggtatggtgtggcaggatcgagacgtgtacctgcagggacccatttgggccaagattcctcacaccgacggacactttcacccttctccactgatgggaggttttggactcaaacacccgcctcctcaaatcatgatcaaaaacactcctgttccagccaatcctcctacaaacttcagcgcggcaaagtttgcttccttcatcacacagtattccacgggacaggtcagcgtggagatcgagtgggagctgcagaaggagaacagcaaacgctggaaccccgagatccagtacacttccaactacaacaaatctgttaatgtggactttactgtggacactaatggtgtgtattcagagcctcgccccattggcaccagatacctgactcgtaatctgtaa

SEQ ID NO: 4485 - DNA, 2208 bp, Artificial Sequence
  source: /note="Description of Artificial Sequence: Synthetic polynucleotide"
atggctgccgatggttatcttccagattggctcgaggacactctctctgaaggaataagacagtggtggaagctcaaacctggcccaccaccaccaaagcccgcagagcggcatcaggacgacagcaggggtcttgtgcttcctgggtacaagtacctcggacccttcaacggactcgacaaaggagagccggtcaacgaggcagacgctgcggccctcgagcacgacaaggcctacgaccggcagctcgacagcggagacaacccgtacctcaagtacaaccacgccgacgcggagtttcaggagcgtcttaaagaagatacgtcttttgggggcaacctcggacgagcagtcttccaggcgaaaaagagggttcttgaacctctgggcctggttgaggaacctgttaagacggctccgggaaaaaagaggccggtagagcactctcctgcggagccagactcctcctcgggaaccggaaaagcgggccagcagcctgcaagaaagagattgaatttcggtcagactggagacgcagactccgtacctgacccccagcctctcggacagccaccagcagcccccacaagtttgggatctactacaatggctacaggcagtggcgcaccaatggcagacaataacgagggtgccgatggagtgggtaattcctcaggaaattggcattgcgattcccaatggctgggcgacagagtcatcaccaccagcacccgaacctgggccctgcccacctacagcaaccacctctacaagcaaatctccagccaatcaggagcatcgaacgacaaccactactttggctacagcaccccttgggggtattttgacttcaacagattccactgtcacttctccccacgtgactggcaaagactcatcaacaacaactggggattccgacccaagagactcaacttcaagctctttaacattcaagtcaaagaggtcacgcagaatgacggtacgacgacgattgccaataaccttaccagcacggttcaggtgtttactgactcggagtaccagctcccgtacgtcctcggctcggcgcatcaaggatgcctcccgccgtttccagcggacgtcttcatggtcccacagtatggatacctcaccctgaacaacgggagtcaggcggtaggacgctcttccttttactgcctggagtactttccttctcagatgctgcgtaccggaaacaactttaccttcagctacacctttgaggacgtgcctttccacagcagctacgctcacagccagagtttggaccggctgatgaatcctctgatcgaccagtatctgtattatctgaacaggacacaatcaaatagtggaactcttcagcagtctaggctactgtttagccaagctggacccaccagcatgtctcttcaagctaaaaactggctgcctggaccttgctacagacagcagcgtctgtcaaagcaggcaaacgacaacaacaacagcaactttccctggactgcggctacaaagtatcatctaaatggtcgggactcgttggttaatccaggaccagctatggccagccacaaagacgatgaagaaaagtttttccccatgcatggaaccctgatatttggtaaacaaggaacaaatgctaacgacgcggatttggaacatgtcatgattacagatgaagaagaaatcaggaccaccaatcccgtggctacagagcagtacggaaacgtgtcaaataatttgcaaaactcaaatactggtccaactacagaaaatgtcaatcaccagggagcgttacctggtatggtgtggcaggatcgagacgtgtacctgcagggacccatttgggccaagattcctcacaccgacggacactttcacccttctccactgatgggaggttttggactcaaacacccgcctcctcaaatcatgatcaaaaacactcctgttccagccaatcctcctacaaacttcagcgcggcaaagtttgcttccttcatcacacagtattccacgggacaggtcagcgtggagatcgagtgggagctgcagaaggagaacagcaaacgctggaaccccgagatccagtacacttccaactacaacaaatctgttaatgtggactttactgtggacactaatggtgtgtattcagagcctcgccccattggcaccagatacctgactcgtaatctgtaa

SEQ ID NO: 4486 - DNA, 2208 bp, Artificial Sequence
  source: /note="Description of Artificial Sequence: Synthetic polynucleotide"
atggctgccgatggttatcttccagattggctcgaggacactctctctgaaggaataagacagtggtggaagctcaaacctggcccaccaccaccaaagcccgcagagcggcatcaggacgacagcaggggtcttgtgcttcctgggtacaagtacctcggacccttcaacggactcgacaaaggagagccggtcaacgaggcagacgctgcggccctcgagcacgacaaggcctacgaccggcagctcgacagcggagacaacccgtacctcaagtacaaccacgccgacgcggagtttcaggagcgtcttaaagaagatacgtcttttgggggcaacctcggacgagcagtcttccaggcgaaaaagagggttcttgaacctctgggcctggttgaggaacctgttaagacggctccgggaaaaaagaggccggtagagcactctcctgcggagccagactcctcctcgggaaccggaaaagcgggccagcagcctgcaagaaagagattgaatttcggtcagactggagacgcagactccgtacctgacccccagcctctcggacagccaccagcagcccccacaagtttgggatctactacaatggctacaggcagtggcgcaccaatggcagacaataacgagggtgccgatggagtgggtaattcctcaggaaattggcattgcgattcccaatggctgggcgacagagtcatcaccaccagcacccgaacctgggccctgcccacctacaacaaccacctctacaagcaaatctccagccaatcaggagcatcgaacgacaaccactactttggctacagcaccccttgggggtattttgacttcaacagattccactgtcacttctccccacgtgactggcaaagactcatcaacaacaactggggattccgacccaagagactcaacttcaagccctttaacattcaagtcaaagaggtcacgcagaatgacggtacgacgacgattgccaataaccttaccagcacggttcaggtgtttactgactcggagtaccagctcccgtacgtcctcggctcggcgcatcaaggatgcctcccgccgtttccagcggacgtcttcatggtcccacagtatggatacctcaccctgaacaacgggagtcaggcggtaggacgctcttccttttactgcctggagtactttccttctcagatgctgcgtaccggaaacaactttaccttcagctacacctttgaggacgtgcctttccacagcagctacgctcacagccagagtttggaccggctgatgaatcctctgatcgaccagtatctgtattatctgaacaggacacaatcaaatagtggaactcttcagcagtctaggctactgtttagccaagctggacccaccagcatgtctcttcaagctaaaaactggctgcctggaccttgctacagacagcagcgtctgtcaaagcaggcaaacgacaacaacaacagcaactttccctggactgcggctacaaagtatcatctaaatggtcgggactcgttggttaatccaggaccagctatggccagccacaaagacgatgaagaaaagtttttccccatgcatggaaccctgatatttggtaaacaaggaacaaatgctaacgacgcggatttggaacatgtcatgattacagatgaagaagaaatcaggaccaccaatcccgtggctacagagcagtacggaaacgtgtcaaataatttgcaaaactcaaatactggtccaactacagaaaatgtcaatcaccagggagcgttacctggtatggtgtggcaggatcgagacgtgtacctgcagggacccatttgggccaagattcctcacaccgacggacactttcacccttctccactgatgggaggttttggactcaaacacccgcctcctcaaatcatgatcaaaaacactcctgttccagccaatcctcctacaaacttcagcgcggcaaagtttgcttccttcatcacacagtattccacgggacaggtcagcgtggagatcgagtgggagctgcagaaggagaacagcaaacgctggaaccccgagatccagtacacttccaactacaacaaatctgttaatgtggactttactgtggacactaatggtgtgtattcagagcctcgccccattggcaccagatacctgactcgtaatctgtaa

SEQ ID NO: 4487 - DNA, 2208 bp, Artificial Sequence
  source: /note="Description of Artificial Sequence: Synthetic polynucleotide"
atggctgccgatggttatcttccagattggctcgaggacactctctctgaaggaataagacagtggtggaagctcaaacctggcccaccaccaccaaagcccgcagagcggcatcaggacgacagcaggggtcttgtgcttcctgggtacaagtacctcggacccttcaacggactcgacaaaggagagccggtcaacgaggcagacgctgcggccctcgagcacgacaaggcctacgaccggcagctcgacagcggagacaacccgtacctcaagtacaaccacgccgacgcggagtttcaggagcgtcttaaagaagatacgtcttttgggggcaacctcggacgagcagtcttccaggcgaaaaagagggttcttgaacctctgggcctggttgaggaacctgttaagacggctccgggaaaaaagaggccggtagagcactctcctgcggagccagactcctcctcgggaaccggaaaagcgggccagcagcctgcaagaaagagattgaatttcggtcagactggagacgcagactccgtacctgacccccagcctctcggacagccaccagcagcccccacaagtttgggatctactacaatggctacaggcagtggcgcaccaatggcagacaataacgagggtgccgatggagtgggtaattcctcaggaaattggcattgcgattcccaatggctgggcgacagagtcatcaccaccagcacccgaacctgggccctgcccacctacaacaaccacctctacaagcaaatctccagccaatcaggagcatcgaacggcaaccactactttggctacagcaccccttgggggtattttgacttcaacagattccactgtcacttctccccacgtgactggcaaagactcatcaacaacaactggggattccgacccaagagactcaacttcaagctctttaacattcaagtcaaagaggtcacgcagaatgacggtacgacgacgattgccaataaccttaccagcacggttcaggtgtttactgactcggagtaccagctcccgtacgtcctcggctcggcgcatcaaggatgcctcccgccgtttccagcggacgtcttcatggtcccacagtatggatacctcaccctgaacaacgggagtcaggcggtaggacgctcttccttttactgcctggagtactttccttctcagatgctgcgtaccggaaacaactttaccttcagctacacctttgaggacgtgcctttccacagcagctacgctcacagccagagtttggaccggctgatgaatcctctgatcgaccagtatctgtattatctgaacaggacacaatcaaatagtggaactcttcagcagtctaggctactgtttagccaagctggacccaccagcatgtctcttcaagctaaaaactggctgcctggaccttgctacagacagcagcgtctgtcaaagcaggcaaacgacaacaacaacagcaactttccctggactgcggctacaaagtatcatctaaatggtcgggactcgttggttaatccaggaccagctatggccagccacaaagacgatgaagaaaagtttttccccatgcatggaaccctgatatttggtaaacaaggaacaaatgctaacgacgcggatttggaacatgtcatgattacagatgaagaagaaatcaggaccaccaatcccgtggctacagagcagtacggaaacgtgtcaaataatttgcaaaactcaaatactggtccaactacagaaaatgtcaatcaccagggagcgttacctggtatggtgtggcaggatcgagacgtgtacctgcagggacccatttgggccaagattcctcacaccgacggacactttcacccttctccactgatgggaggttttggactcaaacacccgcctcctcaaatcatgatcaaaaacactcctgttccagccaatcctcctacaaacttcagcgcggcaaagtttgcttccttcatcacacagtattccacgggacaggtcagcgtggagatcgagtgggagctgcagaaggagaacagcaaacgctggaaccccgagatccagtacacttccaactacaacaaatctgttaatgtggactttactgtggacactaatggtgtgtattcagagcctcgccccattggcaccagatacctgactcgtaatctgtaa

SEQ ID NO: 4488 - DNA, 2208 bp, Artificial Sequence
  source: /note="Description of Artificial Sequence: Synthetic polynucleotide"
atggctgccgatggttatcttccagattggctcgaggacactctctctgaaggaataagacagtggtggaagctcaaacctggcccaccaccaccaaagcccgcagagcggcatcaggacgacagcaggggtcttgtgcttcctgggtacaagtacctcggacccttcaacggactcgacaaaggagagccggtcaacgaggcagacgctgcggccctcgagcacgacaaggcctacgaccggcagctcgacagcggagacaacccgtacctcaagtacaaccacgccgacgcggagtttcaggagcgtcttaaagaagatacgtcttttgggggcaacctcggacgagcagtcttccaggcgaaaaagagggttcttgaacctctgggcctggttgaggaacctgttaagacggctccgggaaaaaagaggccggtagagcactctcctgcggagccagactcctcctcgggaaccggaaaagcgggccagcagcctgcaagaaagagattgaatttcggtcagactggagacgcagactccgtacctgacccccagcctctcggacagccaccagcagcccccacaagtttgggatctactacaatggctacaggcagtggcgcaccaatggcagacaataacgagggtgccgatggagtgggtaattcctcaggaaattggcattgcgattcccaatggctgggcgacagagtcatcaccaccagcacccgaacctgggccctgcccacctacaacaaccacctctacaagcaaatctccagccaatcaggagcatcgaacgacaaccactactttggctacagcaccccttgggggtattttgacttcaacagattccactgtcacttctccccacgtgactggcaaagactcatcaacaacaactggggattccgacccaagagactcaacttcaagctctttaacattcaagtcaaagaggtcacgcagaatgacggtacgacgacgattgccaataaccttaccagcacggttcaggtgtttactgactcggagtaccagctcccgtacgtcctcggctcggcgcatcaaggatgcctcccgccgtttccagcggacgtcttcatggtcccacagtatggatacctcaccctgaacaacgggagtcaggcggtaggacgctcttccttttactgcctggagtactttccttctcagatgctgcgtaccggaaacaactttaccttcagctacacctttgaggacgtgcctttccacagcagctacgctcacagccagagtttggaccggctgatgaatcctctgatcgaccagtatctgtattatctgaacaggacacaatcaaatagtggaactcttcagcagtctaggctactgtttagccaagctggacccaccagcatgtctcttcaagctaaaaactggctgcctggaccttgctacagacagcagcgtctgtcaaagcaggcaaacgacaacaacaacagcaactttccctggactgcggctacaaagtatcatctaaatggtcgggactcgttggttaatccaggaccagctatggccagccacaaagacgatgaagaaaagtttttccccatgcatggaaccctgatatttggtaaacaaggaacaaatgctaacgacgcggatttggaacatgtcatgattacagatgaagaagaaatcaggaccgccaatcccgtggctacagagcagtacggaaacgtgtcaaataatttgcaaaactcaaatactggtccaactacagaaaatgtcaatcaccagggagcgttacctggtatggtgtggcaggatcgagacgtgtacctgcagggacccatttgggccaagattcctcacaccgacggacactttcacccttctccactgatgggaggttttggactcaaacacccgcctcctcaaatcatgatcaaaaacactcctgttccagccaatcctcctacaaacttcagcgcggcaaagtttgcttccttcatcacacagtattccacgggacaggtcagcgtggagatcgagtgggagctgcagaaggagaacagcaaacgctggaaccccgagatccagtacacttccaactacaacaaatctgttaatgtggactttactgtggacactaatggtgtgtattcagagcctcgccccattggcaccagatacctgactcgtaatctgtaa

SEQ ID NO: 4489 - DNA, 2208 bp, Artificial Sequence
  source: /note="Description of Artificial Sequence: Synthetic polynucleotide"
atggctgccgatggttatcttccagattggctcgaggacactctctctgaaggaataagacagtggtggaagctcaaacctggcccaccaccaccaaagcccgcagagcggcatcaggacgacagcaggggtcttgtgcttcctgggtacaagtacctcggacccttcaacggactcgacaaaggagagccggtcaacgaggcagacgctgcggccctcgagcacgacaaggcctacgaccggcagctcgacagcggagacaacccgtacctcaagtacaaccacgccgacgcggagtttcaggagcgtcttaaagaagatacgtcttttgggggcaacctcggacgagcagtcttccaggcgaaaaagagggttcttgaacctctgggcctggttgaggaacctgttaagacggctccgggaaaaaagaggccggtagagcactctcctgcggagccagactcctcctcgggaaccggaaaagcgggccagcagcctgcaagaaagagattgaatttcggtcagactggagacgcagactccgtacctgacccccagcctctcggacagccaccagcagcccccacaagtttgggatctactacaatggctacaggcagtggcgcaccaatggcagacaataacgagggtgccgatggagtgggtaattcctcaggaaattggcattgcgattcccaatggctgggcgacagagtcatcaccaccagcacccgaacctgggccctgcccacctacaacaaccacctctacaagcaaatctccagccaatcaggagcatcgaacgacaaccactactttggctacagcaccccttgggggtattttgacttcaacagattccactgtcacttctccccacgtgactggcaaagactcatcaacaacaactggggattccgacccaagagactcaacttcaagctctttaacattcaagtcaaagaggtcacgcagaatgacggtacgacgacgattgccaataaccttaccagcacggttcaggtgtttactgactcggagtaccagctcccgtacgtcctcggctcggcgcatcaaggatgcctcccgccgtttccagcggacgtcttcatggtcccacagtatggatacctcaccctgaacaacgggagtcaggcggtaggacgctcttccttttactgcctggagtactttccttctcagatgctgcgtaccggaaacaactttaccttcagctacacctttgagggcgtgcctttccacagcagctacgctcacagccagagtttggaccggctgatgaatcctctgatcgaccagtatctgtattatctgaacaggacacaatcaaatagtggaactcttcagcagtctaggctactgtttagccaagctggacccaccagcatgtctcttcaagctaaaaactggctgcctggaccttgctacagacagcagcgtctgtcaaagcaggcaaacgacaacaacaacagcaactttccctggactgcggctacaaagtatcatctaaatggtcgggactcgttggttaatccaggaccagctatggccagccacaaagacgatgaagaaaagtttttccccatgcatggaaccctgatatttggtaaacaaggaacaaatgctaacgacgcggatttggaacatgtcatgattacagatgaagaagaaatcaggaccaccaatcccgtggctacagagcagtacggaaacgtgtcaaataatttgcaaaactcaaatactggtccaactacagaaaatgtcaatcaccagggagcgttacctggtatggtgtggcaggatcgagacgtgtacctgcagggacccatttgggccaagattcctcacaccgacggacactttcacccttctccactgatgggaggttttggactcaaacacccgcctcctcaaatcatgatcaaaaacactcctgttccagccaatcctcctacaaacttcagcgcggcaaagtttgcttccttcatcacacagtattccacgggacaggtcagcgtggagatcgagtgggagctgcagaaggagaacagcaaacgctggaaccccgagatccagtacacttccaactacaacaaatctgttaatgtggactttactgtggacactaatggtgtgtattcagagcctcgccccattggcaccagatacctgactcgtaatctgtaa

SEQ ID NO: 4490 - DNA, 2208 bp, Artificial Sequence
  source: /note="Description of Artificial Sequence: Synthetic polynucleotide"
atggctgccgatggttatcttccagattggctcgaggacactctctctgaaggaataagacagtggtggaagctcaaacctggcccaccaccaccaaagcccgcagagcggcatcaggacgacagcaggggtcttgtgcttcctgggtacaagtacctcggacccttcaacggactcgacaaaggagagccggtcaacgaggcagacgctgcggccctcgagcacgacaaggcctacgaccggcagctcgacagcggagacaacccgtacctcaagtacaaccacgccgacgcggagtttcaggagcgtcttaaagaagatacgtcttttgggggcaacctcggacgagcagtcttccaggcgaaaaagagggttcttgaacctctgggcctggttgaggaacctgttaagacggctccgggaaaaaagaggccggtagagcactctcctgcggagccagactcctcctcgggaaccggaaaagcgggccagcagcctgcaagaaagagattgaatttcggtcagactggagacgcagactccgtacctgacccccagcctctcggacagccaccagcagcccccacaagtttgggatctactacaatggctacaggcagtggcgcaccaatggcagacaataacgagggtgccgatggagtgggtaattcctcaggaaattggcattgcgattcccaatggctgggcgacagagtcatcaccaccagcacccgaacctgggccctgcccacctacaacaaccacctctacaagcaaatctccagccaatcaggagcatcgaacgacaaccactactttggctacagcaccccttgggggtattttgacttcaacagattccactgtcacttctccccacgtgactggcaaagactcatcaacaacaactggggattccgacccaagagactcaacttcaagctctttaacattcaagtcaaagaggtcacgcagaatgacggtacgacgacgattgccaataaccttaccagcacggttcaggtgtttactgactcggagtaccagctcccgtacgtcctcggctcggcgcatcaaggatgcctcccgccgtttccagcggacgtcttcatggtcccacagtatggatacctcaccctgaacaacgggagtcaggcggtaggacgctcttccttttactgcctggagtactttccttctcagatgctgcgtaccggaaacaactttaccttcagctacacctttgaggacgtgcctttccacagcagctacgctcacagccagagtttggaccggctgatgaatcctctgatcgaccagtatctgtattatctgaacaggacacaatcaaatagtggaactcttcagcagtctaggctactgtttagccaagctggacccaccagcatgtctcttcaagctaaaaactggctgcctggaccttgctacagacagcagcgtctgtcaaagcaggcaaacgacaacaacaacagcaactttccctggactgcggctacaaagtatcatctaaatggtcgggactcgttggttaatccaggaccagctatggccagccacaaagacgatgaagaaaagtttttccccatgcatggaaccctgatatttggtaaacaaggaacaaatgctaacgacgcggatttggaacatgtcatgattacagatgaagaagaaatcaggaccaccaatcccgtggctacagagcagtacggaaacgtgtcaaataatttgcaaaactcaaatactggtccaactacagaaaatgtcaatcaccagggagcgttacctggtatggtgtggcaggatcgagacgtgtacctgcagggacccatttgggccaagattcctcacaccgacggacactttcacccttctccactgatgggaggttttggactcaaacacccgcctcctcaaatcatgatcaaaaacactcctgttccagccaatcctcctacaaacttcagcgcggcaaagtttgcttccttcatcacacagtattccacgggacaggtcagcgtggagatcgagtgggagctgcagaaggagaacagcaaacgctggaaccccgagatccagtacacttccaactacagcaaatctgttaatgtggactttactgtggacactaatggtgtgtattcagagcctcgccccattggcaccagatacctgactcgtaatctgtaa

SEQ ID NO: 4491 - DNA, 2208 bp, Artificial Sequence
  source: /note="Description of Artificial Sequence: Synthetic polynucleotide"
atggctgccgatggttatcttccagattggctcgaggacactctctctgaaggaataagacagtggtggaggctcaaacctggcccaccaccaccaaagcccgcagagcggcatcaggacgacagcaggggtcttgtgcttcctgggtacaagtacctcggacccttcaacggactcgacaaaggagagccggtcaacgaggcagacgctgcggccctcgagcacgacaaggcctacgaccggcagctcgacagcggagacaacccgtacctcaagtacaaccacgccgacgcggagtttcaggagcgtcttaaagaagatacgtcttttgggggcaacctcggacgagcagtcttccaggcgaaaaagagggttcttgaacctctgggcctggttgaggaacctgttaagacggctccgggaaaaaagaggccggtagagcactctcctgcggagccagactcctcctcgggaaccggaaaagcgggccagcagcctgcaagaaagagattgaatttcggtcagactggagacgcagactccgtacctgacccccagcctctcggacagccaccagcagcccccacaagtttgggatctactacaatggctacaggcagtggcgcaccaatggcagacaataacgagggtgccgatggagtgggtaattcctcaggaaattggcattgcgattcccaatggctgggcgacagagtcatcaccaccagcacccgaacctgggccctgcccacctacaacaaccacctctacaagcaaatctccagccaatcaggagcatcgaacgacaaccactactttggctacagcaccccttgggggtattttgacttcaacagattccactgtcacttctccccacgtgactggcaaagactcatcaacaacaactggggattccgacccaagagactcaacttcaagctctttaacattcaagtcaaagaggtcacgcagaatgacggtacgacgacgattgccaataaccttaccagcacggttcaggtgtttactgactcggagtaccagctcccgtacgtcctcggctcggcgcatcaaggatgcctcccgccgtttccagcggacgtcttcatggtcccacagtatggatacctcaccctgaacaacgggagtcaggcggtaggacgctcttccttttactgcctggagtactttccttctcagatgctgcgtaccggaaacaactttaccttcagctacacctttgaggacgtgcctttccacagcagctacgctcacagccagagtttggaccggctgatgaatcctctgatcgaccagtatctgtattatctgaacaggacacaatcaaatagtggaactcttcagcagtctaggctactgtttagccaagctggacccaccagcatgtctcttcaagctaaaaactggctgcctggaccttgctacagacagcagcgtctgtcaaagcaggcaaacgacaacaacaacagcaactttccctggactgcggctacaaagtatcatctaaatggtcgggactcgttggttaatccaggaccagctatggccagccacaaagacgatgaagaaaagtttttccccatgcatggaaccctgatatttggtaaacaaggaacaaatgctaacgacgcggatttggaacatgtcatgattacagatgaagaagaaatcaggaccaccaatcccgtggctacagagcagtacggaaacgtgtcaaataatttgcaaaactcaaatactggtccaactacagaaaatgtcaatcaccagggagcgttacctggtatggtgtggcaggatcgagacgtgtacctgcagggacccatttgggccaagattcctcacaccgacggacactttcacccttctccactgatgggaggttttggactcaaacacccgcctcctcaaatcatgatcaaaaacactcctgttccagccaatcctcctacaaacttcagcgcggcaaagtttgcttccttcatcacacagtattccacgggacaggtcagcgtggagatcgagtgggagctgcagaaggagaacagcaaacgctggaaccccgagatccagtacacttccaactacaacaaatctgttaatgtggactttactgtggacactaatggtgtgtattcagagcctcgccccattggcaccagatacctgactcgtaatctgtaa

SEQ ID NO: 4492 - DNA, 2208 bp, Artificial Sequence
  source: /note="Description of Artificial Sequence: Synthetic polynucleotide"
atggctgccgatggttatcttccagattggctcgaggacactctctctgaaggaataagacagtggtggaagctcaaacctggcccaccaccgccaaagcccgcagagcggcacaaggacgacagtaggggtcttgtgcttcctgggtacaagtacctcggacccttcaacggactcgacaaaggagagccggtcaacgaggcagacgccgcggccctcgagcacgacaaggcctacgaccggcagctcgacagcggagacaacccgtacctcaagtacaaccacgccgacgcggagtttcaggagcgtcttaaagaagatacgtcttttgggggcaacctcggacgagcagtattccaggcgaaaaagagggttcttgaacctctgggcctggttgaggagcctgttaagacggctccgggaaaaaagaggccggtagagcactctcctgtggagccagactcctcctcgggaaccggaaaagcgggccagcagcctgcaagaaaaagattgaattttggtcagactggagacgcagactccgtacctgacccccagcctctcggacagccaccagcagcccccacaagtttgggatctactacaatggctacaggcagtggcgcaccaatggcagacaataacgagggtgccgatggagtgggtaattcctcaggaaattggcattgcgattcccaatggctgggcgacagagtcatcaccaccagcacccgaacctgggccctgcccacctacaacaaccacctctacaagcaaatctccagccaatcaggagcatcgaacgacaaccactactttggccacagcaccccttgggggtattttgacttcaacagattccactgtcacttctccccacgtgactggcaaagactcatcaacaacaactggggattccgacccaagagactcaacttcaagctctttaacattcaagtcaaagaggtcacgcagaatgacggtacgacgacgattgccaataaccttaccagcacggttcaggtgtttactgactcggagtaccagctcccgtacgtcctcggctcggcgcatcaaggatgcctcccgccgttcccagcagacgtcttcatggtcccacagtatggatacctcaccctgaacaacgggagtcaggcggtaggacgctcttccttttactgcctggagtactttccttctcagatgcttcgtaccggaaacaactttaccttcagctacacctttgaagacgtgcctttccacagtagctacgctcacagccagagtctggatcggctgatgaatcctcttatcgaccagtacctgtattatctaaacaaaacacaatcaaatagtggaactcttcagcagtctcggctactgtttagtcaagctggacccaccagcatgtctcttcaagctaaaaactggctgcctggaccttgctacagacaacagcgtctgtcaaagcaggcaaacgacaacaacaacagcaactttccctggactgcggctacaaagtatcatctaaatggccgggactcgttggttaatccaggaccagctatggccagccacaaagacgatgaagaaaagtttttccccatgcatggaaccctgatatttggtaaacaaggaacaaatgctaacgacgcggatttggacaatgtcatgattacagatgaagaagaaatccgcaccaccaatcccgtggctacggagcagtacgggactgtgtcaaataatttgcaaaactcaaatactggtccaactactggaactgtcaatcaccaaggagcgttacctggtatggtgtggcaggatcgagacgtgtacctgcagggacccatttgggccaagattcctcacaccgatggacactttcatccttctccactgatgggaggttttggactcaaacacccgcctcctcagatcatgatcaaaaacactcccgttccagccaatcctcctacaaacttcagttctgccaagtctgcttccttcatcacacagtattccacgggacaagtcagcgtggagattgagtgggagctgcagaaggagaacagcaaacgctggaaccccgagatccagtacacttccaactacaacaaatctgttaatgtggactttactgtggacactaatggcgtgtattcagagcctcgccccattggcaccagatacctgactcgtaatctgtaa

SEQ ID NO: 4493 - DNA, 2208 bp, Artificial Sequence
  source: /note="Description of Artificial Sequence: Synthetic polynucleotide"
atggctgccgatggttatcttccagattggctcgaggacactctctctgaaggaataagacagtggtggaagctcaaacctggcccaccaccgccaaagcccgcagagcggcacaaggacgacagtaggggtcttgtgcttcctgggtacaagtacctcggacccttcaacggactcgacaaaggagagccggtcaacgaggcagacgccgcggccctcgagcacgacaaggcctacgaccggcagctcgacagcggagacaacccgtacctcaagtacaaccacgccgacgcggagtttcaggagcgtcttaaagaagatacgtcttttgggggcaacctcggacgagcagtcttccaggcgaaaaagagggttcttgaacctctgggcctggttgaggaacctgttaagacggctccgggaaaaaagaggccggtagagcactctcctgtggagccagactcctcctcgggaaccggaaaggcgggccagcagcctgcaagaaaaagattgaattttggtcagactggagacgcagactcagtacctgacccccagcctctcggacagccaccagcagccccctctggtctgggaactaatacgatggctacaggcagtggcgcaccaatggcagacaataacgagggcgccgacggagtgggtaattcctcgggaaattggcattgcgattccacatggatgggcgacagagtcatcaccaccagcacccgaacctgggccctgcccacctacaacaaccacctctacaaacaaatttccagccaatcaggagcctcgaacgacaatcactactttggctacagcaccccttgggggtattttgacttcaacagattccactgccacttttcaccacgtgactggcaaagactcatcaacaacaactggggattccgacccaagagactcaacttcaagctctttaacattcaagtcaaagaggtcacgcagaatgacggtacgacgacgattgccaataaccttaccagcacggttcaggtgtttactgactcggagtaccagctcccgtacgtcctcggctcggcgcatcaaggatgcctcccgccgttcccagcagacgtcttcatggtcccacagtatggatacctcaccctgaacaacgggagtcaggcggtaggacgctcttccttttactgcctggagtactttccttctcagatgcttcgtaccggaaacaactttaccttcagctacacctttgaagacgtgcctttccacagtagctacgctcacagccagagtctggatcggctgatgaatcctcttatcgaccagtacctgtattatctaaacaaaacacaatcaaatagtggaactcttcagcagtctcggctactgtttagtcaagctggacccaccagcatgtctcttcaagctaaaaactggctgcctggaccttgctacagacaacagcgtctgtcaaagcaggcaaacgacaacaacaacagcaactttccctggactgcggctacaaagtatcatctaaatggccgggactcgttggttaatccaggaccagctatggccagccacaaagacgatgaagaaaagtttttccccatgcatggaaccctgatatttggtaaacaaggaacaaatgctaacgacgcggatttggacaatgtcatgattacagatgaagaagaaatccgcaccaccaatcccgtggctacggagcagtacgggactgtgtcaaataatttgcaaaactcaaatactggtccaactactggaactgtcaatcaccaaggagcgttacctggtatggtgtggcaggatcgagacgtgtacctgcagggacccatttgggccaagattcctcacaccgatggacactttcatccttctccactgatgggaggttttggactcaaacacccgcctcctcagatcatgatcaaaaacactcccgttccagccaatcctcctacaaacttcagttctgccaagtttgcttccttcatcacacagtattccacgggacaagtcagcgtggagattgagtgggagctgcagaaggagaacagcaaacgctggaaccccgagatccagtacacttccaactacaacaaatctgttaatgtggactttactgtggacactaatggcgtgtattcagagcctcgccccattggcaccagatacctgactcgtaatctgtaa

SEQ ID NO: 4494 - DNA, 2208 bp, Artificial Sequence
  source: /note="Description of Artificial Sequence: Synthetic polynucleotide"
atggctgccgatggttatcttccagattggctcgaggacactctccctgaaggaataagacagtggtggaagctcaaacctggcccaccaccgccaaagcccgcagagcggcacaaggacgacagtaggggtcttgtgcttcctgggtacaagtacctcggacccttcaacggactcgacaaaggagagccggtcaacgaggcagacgccgcggccctcgagcacgacaaggcctacgaccggcagctcgacagcggagacaacccgtacctcaagtacaaccacgccgacgcggagtttcaggagcgtcttaaagaagatacgtcttttgggggcaacctcggacgagcagtattccaggcgaaaaagagggttcttgaacctctgggcctggttgaggagcctgttaagacggctccgggaaaaaagaggccggtagagcactctcctgtggagccagactcctcctcgggaaccggaaaagcgggccagcagcctgcaagaaaaagattgaattttggtcagactggagacgcagactccgtacctgacccccagcctctcggacagccaccagcagcccccacaagtttgggatctactacaatggctacaggcagtggcgcaccaatggcagacaataacgagggtgccgatggagtgggtaattcctcaggaaattggcattgcgattcccaatggctgggcgacagagtcatcaccaccagcacccgaacctgggccctgcccacctacaacaaccacctctacaagcaaatctccagccaatcaggagcatcgaacgacaaccactactttggccacagcaccccttgggggtattttgacttcaacagattccactgtcacttctccccacgtgactggcaaagactcatcaacaacaactggggattccgacccaagagactcaacttcaagctctttaacattcaagtcaaagaggtcacgcagaatgacggtacgacgacgattgccaataaccttaccagcacggttcaggtgtttactgactcggagtaccagctcccgtacgtcctcggctcggcgcatcaaggatgcctcccgccgttcccagcagacgtcttcatggtcccacagtatggatacctcaccctgaacaacgggagtcaggcggtaggacgctcttccttttactgcctggagtactttccttctcagatgcttcgtaccggaaacaactttaccttcagctacacctttgaagacgtgcctttccacagtagctacgctcacagccagagtctggatcggctgatgaatcctcttatcgaccagtacctgtattatctaaacaaaacacaatcaaatagtggaactcttcagcagtctcggctactgtttagtcaagctggacccaccagcatgtctcttcaagctaaaaactggctgcctggaccttgctacagacaacagcgtctgtcaaagcaggcaaacgacaacaacaacagcaactttccctggactgcggctacaaagtatcatctaaatggccgggactcgttggttaatccaggaccagctatggccagccacaaagacgatgaagaaaagtttttccccatgcatggaaccctgatatttggtaaacaaggaacaaatgctaacgacgcggatttggacaatgtcatgattacagatgaagaagaaatccgcaccaccaatcccgtggctacggagcagtacgggactgtgtcaaataatttgcaaaactcaaatactggtccaactactggaactgtcaatcaccaaggagcgttacctggtatggtgtggcaggatcgagacgtgtacctgcagggacccatttgggccaagattcctcacaccgatggacactttcatccttctccactgatgggaggttttggactcaaacacccgcctcctcagatcatgatcaaaaacactcccgttccagccaatcctcctacaaacttcagttctgccaagtttgcttccttcatcacacagtattccacgggacaagtcagcgtggagattgagtgggagctgcagaaggagaacagcaaacgctggaaccccgagatccagtacacttccaactacaacaaatctgttaatgtggactttactgtggacactaatggcgtgtattcagagcctcgccccattggcaccagatacctgactcgtaatctgtaa

SEQ ID NO: 4495 - DNA, 2208 bp, Artificial Sequence
  source: /note="Description of Artificial Sequence: Synthetic polynucleotide"
atggctgccgatggttatcttccagattggctcgaggacactctctctgaaggaataagacagtggtggaagctcaaacctggcccaccaccgccaaagcccgcagagcggcacaaggacgacagtaggggtcttgtgcttcctgggtacaagtacctcggacccttcaacggactcgacaaaggagagccggtcaacgaggcagacgccgcggccctcgagcacgacaaggcctacgaccggcagctcgacagcggagacaacccgtacctcaagtacaaccacgccgacgcggagtttcaggagcgtcttaaagaagatacgtcttttgggggcaacctcggacgagcagtattccaggcgaaaaagagggttcttgaacctctgggcctggttgaggagcctgttaagacggctccgggaaaaaagaggccggtagagcactctcctgtggagccagactcctcctcgggaaccggaaaagcgggccagcagcctgcaagaaaaagattgaattttggtcagactggagacgcagactccgtacctgacccccagcctctcggacagacaccagcagcccccacaagtttgggatctactacaatggctacaggcagtggcgcaccaatggcagacaataacgagggtgccgatggagtgggtaattcctcgggaaattggcattgcgattcccaatggctgggcgacagagtcatcaccaccagcacccgaacctgggccctgcccacctacaacaaccacctctacaagcaaatctccagccaatcaggagcatcgaacgacaaccactactttggctacagcaccccttgggggtattttgacttcaacagattccactgtcacttctccccacgtgactggcaaagactcatcaacaacaactggggattccgacccaagagactcaacttcaagctctttaacattcaagtcaaagaggtcacgcagaatgacggtacgacgacgattgccaataaccttaccagcacggttcaggtgtttactgactcggagtaccagctcccgtacgtcctcggctcggcgcatcaaggatgcctcccgccgttcccagcagacgtcttcatggtcccacagtatggatacctcaccctgaacaacgggagtcaggcggtaggacgctcttccttttactgcctggagtactttccttctcagatgcttcgtaccggaaacaactttaccttcagctacacctttgaagacgtgcctttccacagtagctacgctcacagccagagtctggatcggctgatgaatcctcttatcgaccagtacctgtattatctaaacaaaacacaatcaaatagtggaactcttcagcagtctcggctactgtttagtcaagctggacccaccagcatgtctcttcaagctaaaaactggctgcctggaccttgctacagacaacagcgtctgtcaaagcaggcaaacgacaacaacaacagcaactttccctggactgcggctacaaagtatcatctaaatggccgggactcgttggttaatccaggaccagctatggccagccacaaagacgatgaagaaaagtttttccccatgcatggaaccctgatatttggtaaacaaggaacaaatgctaacgacgcggatttggacaatgtcatgattacagatgaagaagaaatccgcaccaccaatcccgtggctacggagcagtacgggactgtgtcaaataatttgcaaaactcaaatactggtccaactactggaactgtcaatcaccaaggagcgttacctggtatggtgtggcaggatcgagacgtgtacctgcagggacccatttgggccaagattcctcacaccgatggacactttcatccttctccactgatgggaggttttggactcaaacacccgcctcctcagatcatgatcaaaaacactcccgttccagccaatcctcctacaaacttcagttctgccaagtttgcttccttcatcacacagtattccacaggacaagtcggcgtggagattgagtgggagctgcagaaggagaacagcaaacgctggaaccccgagatccagtacacttccaactacaacaaatctgttaatgtggactttactgtggacactaatggcgtgtattcagagcctcgccccattggcaccagatacctgactcgtaatctgtaa

SEQ ID NO: 4496 - DNA, 2208 bp, Artificial Sequence
  source: /note="Description of Artificial Sequence: Synthetic polynucleotide"
atggctgccgatggttatcttccagattggctcgaggacactctctctgaaggaataagacagtggtggaagctcaaacctggcccaccaccgccaaagcccgcagagcggcacaaggacgacagtaggggtcttgtgcttcctgggtacaagtacctcggacccttcaacggactcgacaaaggagagccggtcaacgaggcagacgccgcggccctcgagcacgacaaggcctacgaccggcagctcgacagcggagacaacccgtacctcaagtacaaccacgccgacgcggagtttcaggagcgtcttaaagaagatacgtcttttgggggcaacctcggacgagcagtattccaggcgaaaaagagggttcttgaacctctgggcctggttgaggagcctgttaagacggctccgggaaaaaagaggccggtagagcactctcctgtggagccagactcctcctcgggaaccggaaaagcgggccagcagcctgcaagaaaaagattgaattttggtcagactggagacgcagactccgtacctgacccccagcctctcggacagacaccagcagcccccacaagtttgggatctactacaatggctacaggcagtggcgcaccaatggcagacaataacgagggtgccgatggagtgggtaattcctcgggaaattggcattgcgattcccaatggctgggcgacagagtcatcaccaccagcacccgaacctgggccctgcccacctacaacaaccacctctacaagcaaatctccagccaatcaggagcatcgaacgacaaccactactttggctacagcaccccttgggggtattttgacttcaacagattccactgtcacttctccccacgtgactggcaaagactcatcaacaacaactggggattccgacccaagagactcaacttcaagctctttaacattcaagtcaaagaggtcacgcagaatgacggtacgacgacgattgccaataaccttaccagcacggttcaggtgtttactgactcggagtaccagctcccgtacgtcctcggctcggcgcatcaaggatgcctcccgccgttcccagcagacgtcttcatggtcccacagtatggatacctcaccctgaacaacgggagtcaggcggtaggacgctcttccttttactgcctggagtactttccttctcagatgcttcgtaccggaaacaactttaccttcagctacacctttgaagacgtgcctttccacagtagctacgctcacagccagagtctggatcggctgatgaatcctcttatcgaccagtacctgtattatctaaacaaaacacaatcaaatagtggaactcttcagcagtctcggctactgtttagtcaagctggacccaccagcatgtctcttcaagctaaaaactggctgcctggaccttgctacagacaacagcgtctgtcaaagcaggcaaacgacaacaacaacagcaactttccctggactgcggctacaaagtatcatctaaatggccgggactcgttggttaatccaggaccagctatggccagccacaaagacgatgaagaaaagtttttccccatgcatggaaccctgatatttggtaaacaaggaacaaatgctaacgacgcggatttggacaatgtcatgattacagatgaagaagaaatccgcaccaccaatcccgtggctacggagcagtacgggactgtgtcaaataatttgcaaaactcaaatactggtccaactactggaactgtcaatcaccaaggagcgttacctggtatggtgtggcaggatcgagacgtgtacctgcagggacccatttgggccaagattcctcacaccgatggacactttcatccttctccactgatgggaggttttggactcaaacacccgcctcctcagatcatgatcaaaaacactcccgttccagccaatcctcctacaaacttcagttctgccaagtttgcttccttcatcacacagtattccacgggacaagtcagcgtggagattgagtgggagctgcagaaggagaacagcaaacgctggaaccccgagatccagtacacttccaactacaacaaatctgttaatgtggactttactgtggacactaatggcgtgtattcagagcctcgccccattggcaccagatacctgactcgtaatctgtaa

SEQ ID NO: 4497 - DNA, 2208 bp, Artificial Sequence
  source: /note="Description of Artificial Sequence: Synthetic polynucleotide"
atggctgccgatggttatcttccagattggctcgaggacactctctctgaaggaataagacagtggtggaagctcaaacctggcccaccaccgccaaagcccgcagagcggcacaaggacgacagtaggggtcttgtgcttcctgggtacaagtacctcggacccttcaacggactcgacaaaggagagccggtcaacgaggcagacgccgcggccctcgagcacgacaaggcctacgaccggcagctcgacagcggagacaacccgtacctcaagtacaaccacgccgacgcggagtttcaggagcgtcttaaagaagatacgtcttttgggggcaacctcggacgagcagtattccaggcgaaaaagagggttcttgaacctctgggcctggttgaggagcctgttaagacggctccgggaaaaaagaggccggtagagcactctcctgtggagccagactcctcctcgggaaccggaaaagcgggccagcagcctgcaagaaaaagattgaattttggtcagactggagacgcagactccgtacctgacccccagcctctcggacagccaccagcagcccccacaagtttgggatctactacaatggctacaggcagtggcgcaccaatggcagacaataacgagggtgccgatggagtgggtaattcctcaggaaatcggcattgcgattcccaatggctgggcgacagagtcatcaccaccagcacccgaacctgggccctgcccacctacaacaaccacctctacaagcaaatctccagccaatcaggagcatcgaacgacaaccactactttggccacagcaccccttgggggtattttgacttcaacagattccactgtcacttctccccacgtgactggcaaagactcatcaacaacaactggggattccgacccaagagactcaacttcaagctctttaacattcaagtcaaagaggtcacgcagaatgacggtacgacgacgattgccaataaccttaccagcacggttcaggtgtttactgactcggagtaccagctcccgtacgtcctcggctcggcgcatcaaggatgcctcccgccgttcccagcagacgtcttcatggtcccacagtatggatacctcaccctgaacaacgggagtcaggcggtaggacgctcttccttttactgcctggagtactttccttctcagatgcttcgtaccggaaacaactttaccttcagctacacctttgaagacgtgcctttccacagtagctacgctcacagccagagtctggatcggctgatgaatcctcttatcgaccagtacctgtattatctaaacaaaacacaatcaaatagtggaactcttcagcagtctcggctactgtttagtcaagctggacccaccagcatgtctcttcaagctaaaaactggctgcctggaccttgctacagacaacagcgtctgtcaaagcaggcaaacgacaacaacaacagcaactttccctggactgcggctacaaagtatcatctaaatggccgggactcgttggttaatccaggaccagctatggccagccacaaagacgatgaagaaaagtttttccccatgcatggaaccctgatatttggtaaacaaggaacaaatgctaacgacgcggatttggacaatgtcatgattacagatgaagaagaaatccgcaccaccaatcccgtggctacggagcagtacgggactgtgtcaaataatttgcaaaactcaaatactggtccaactactggaactgtcaatcaccaaggagcgttacctggtatggtgtggcaggatcgagacgtgtacctgcagggacccatttgggccaagattcctcacaccgatggacactttcatccttctccactgatgggaggttttggactcaaacacccgcctcctcagatcatgatcaaaaacactcccgttccagccaatcctcctacaaacttcagttctgccaagtttgcttccttcatcacacagtattccacgggacaagtcagcgtggagattgagtgggagctgcagaaggagaacagcaaacgctggaaccccgagatccagtacacttccaactacaacaaatctgttaatgtggactttactgtggacactaatggcgtgtattcagagcctcgccccattggcaccagatacctgactcgtaatctgtaa

SEQ ID NO: 4498 - DNA, 2208 bp, Artificial Sequence
  source: /note="Description of Artificial Sequence: Synthetic polynucleotide"
atggctgccgatggttatcttccagattggctcgaggacactctctctgaaggaataagacagtggtggaagctcaaacctggcccaccaccgccaaagcccgcagagcggcacaaggacgacagtaggggtcttgtgcttcctgggtacaagtacctcggacccttcaacggactcgacaaaggagagccggtcaacgaggcagacgccgcggccctcgagcacgacaaggcctacgaccggcagctcgacagcggagacaacccgtacctcaagtacaaccacgccgacgcggagtttcaggagcgtcttaaagaagatacgtcttttgggggcaacctcggacgagcagtattccaggcgaaaaagagggttcttgaacctctgggcctggttgaggagcctgttaagacggctccgggaaaaaagaggccggtagagcactctcctgtggagccagactcctcctcgggaaccggaaaagcgggccagcagcctgcaagaaaaagattgaattttggtcagactggagacgcagactccgtacctgacccccagcctctcggacagccaccagcagcccccacaagtttgggatctactacaatggctacaggcagtggcgcaccaatggcagacaataacgagggtgccgatggagtgggtaattcctcaggaaattggcattgcgattcccaatggctgggcgacagagtcatcaccaccagcacccgaacctgggccctgcccacctacaacaaccacctctacaagcaaatctccagccaatcaggagcatcgaacgacaaccactactttggctacagcaccccttgggggtattttgacttcaacagattccactgtcacttctccccacgtgactggcaaagactcatcaacaacaactggggattccgacccaagagactcaacttcaagctctttaacattcaagtcaaagaggtcacgcagaatgacggtacgacgacgattgccaataaccttaccagcacggttcaggtgtttactgactcggagtaccagctcccgtacgtcctcggctcggcgcatcaaggatgcctcccgccgttcccagcagacgtcttcatggtcccacagtatggatacctcaccctgaacaacgggagtcaggcggtaggacgctcttccttttactgcctggagtactttccttctcagatgcctcgtaccggaaacaactttaccttcagctacacctttgaagacgtgcctttccacagtagctacgctcacagccagagtctggatcggctgatgaatcctcttatcgaccagtacctgtattatctaaacaaaacacaatcaaatagtggaactcttcagcagtctcggctactgtttagtcaagctggacccaccagcatgtctcttcaagctaaaaactggctgcctggaccttgctacagacaacagcgtctgtcaaagcaggcaaacgacaacaacaacagcaactttccctggactgcggctacaaagtatcatctaaatggccgggactcgttggttaatccaggaccagctatggccagccacaaagacgatgaagaaaagtttttccccatgcatggaaccctgatatttggtaaacaaggaacaaatgctaacgacgcggatttggacaatgtcatgattacagatgaagaagaaatccgcaccaccaatcccgtggctacggagcagtacgggactgtgtcaaataatttgcaaaactcaaatactggtccaactactggaactgtcaatcaccaaggagcgttacctggtatggtgtggcaggatcgagacgtgtacctgcagggacccatttgggccaagattcctcacaccgatggacactttcatccttctccactgatgggaggttttggactcaaacacccgcctcctcagatcatgatcaaaaacactcccgttccagccaatcctcctacaaacttcagttctgccaagtttgcttccttcatcacacagtattccacgggacaagtcagcgtggagattgagtgggagctgcagaaggagaacagcaaacgctggaaccccgagatccagtacacttccaactacaacaaatctgttaatgtggactttactgtggacactaatggcgtgtattcagagcctcgccccattggcaccagatacctgactcgtaatctgtaa

SEQ ID NO: 4499 - DNA, 2208 bp, Artificial Sequence
  source: /note="Description of Artificial Sequence: Synthetic polynucleotide"
atggctgccgatggttatcttccagattggctcgaggacactctctctgaaggaataagacagtggtggaagctcaaacctggcccaccaccgccaaagcccgcagagcggcacaaggacgacagtaggggtcttgtgcttcctgggtacaagtacctcggacccttcaacggactcgacaaaggagagccggtcaacgaggcagacgccgcggccctcgagcacgacaaggcctacgaccggcagctcgacagcggagacaacccgtacctcaagtacaaccacgccgacgcggagtttcaggagcgtcttaaagaagatacgtcttttgggggcaacctcggacgagcagtattccaggcgaaaaagagggttcttgaacctctgggcctggttgaggagcctgttaagacggctccgggaaaaaagaggccggtagagcactctcctgtggagccagactcctcctcgggaaccggaaaagcgggccagcagcctgcaagaaaaagattgaattttggtcagactggagacgcagactccgtacctgacccccagcctctcggacagccaccagcagcccccacaagtttgggatctactacaatggctacaggcagtggcgcaccaatggcagacaataacgagggtgccgatggagtgggtaattcctcgggaaattggcattgcgattcccaatggctgggcgacagagtcatcaccaccagcacccgaacctgggccctgcccacctacaacaaccacctctacaagcaaatctccagccaatcaggagcatcgaacgacaaccactactttggctacagcaccccttgggggtattttgacttcaacagattccactgtcacttctccccacgtgactggcaaagactcatcaacaacaactggggattccgacccaagagactcaacttcaagctctttaacattcaagtcaaagaggtcacgcagaatgacggtacgacgacgattgccaataaccttaccagcacggttcaggtgtttactgactcggagtaccagctcccgtacgtcctcggctcggcgcatcaaggatgcctcccgccgttcccagcagacgtcttcatggtcccacagtatggatacctcaccctgaacaacgggagtcaggcggtaggacgctcttccttttactgcctggagtactttccttctcagatgcttcgtaccggaaacaactttaccttcagctacacctttgaagacgtgcctttccacagtagctacgctcacagccagagtctggatcggctgatgaatcctcttatcgaccagtacctgtattatctaaacaaaacacaatcaaatagtggaactcttcagcagtctcggctactgtttagtcaagctggacccaccagcatgtctcttcaagctaaaaactggctgcctggaccttgctacagacaacagcgtctgtcaaagcaggcaaacgacaacaacaacagcaactttccctggactgcggctacaaagtatcatctaaatggccgggactcgttggttaatccaggaccagctatggccagccacaaagacgatgaagaaaagtttttccccatgcatggaaccctgatatttggtaaacaaggaacaaatgctaacgacgcggatttggacaatgtcatgattacagatgaagaagaaatccgcaccaccaatcccgtggctacggagcagtacgggactgtgtcaaataatttgcaaaactcaaatactggtccaactactggaactgtcaatcaccaaggagcgttacctggtatggtgtggcaggatcgagacgtgtacctgcagggacccatttgggccaagattcctcacaccgatggacactttcatccttctccactgatgggaggttttggactcaaacacccgcctcctcagatcatgatcaaaaacactcccgttccagccaatcctcctacaaacttcagttctgccaagtctgcttccttcatcacacagtattccacgggacaagtcagcgtggagattgagtgggagctgcagaaggagaacagcaaacgctggaaccccgagatccagtacacttccaactacaacaaatctgttaatgtggactttactgtggacactaatggcgtgtattcagagcctcgccccattggcaccagatacctgactcgtaatctgtaa

SEQ ID NO: 4500 - DNA, 2208 bp, Artificial Sequence
  source: /note="Description of Artificial Sequence: Synthetic polynucleotide"
atggctgccgatggttatcttccagattggctcgaggacactctctctgaaggaataagacagtggtggaagctcaaacctggcccaccaccgccaaagcccgcagagcggcacaaggacgacagtaggggtcttgtgcttcctgggtacaagtacctcggacccttcaacggactcgacaaaggagagccggtcaacgaggcagacgccgcggccctcgagcacgacaaggcctacgaccggcagctcgacagcggagacaacccgtacctcaagtacaaccacgccgacgcggagtttcaggagcgtcttaaagaagatacgtcttttgggggcaacctcggacgagcagtattccaggcgaaaaagagggttcttgaacctctgggcctggttgaggagcctgttaagacggctccgggaaaaaagaggccggtagagcactctcctgtggagccagactcctcctcgggaaccggaaaagcgggccagcagcctgcaagaaaaagattgaattttggtcagactggagacgcagactccgtacctgacccccagcctctcggacagccaccagcagcccccacaagtttgggatctactacaatggctacaggcagtggcgcaccaatggcagacaataacgagggtgccgatggagtgggtaattcctcaggaaattggcattgcgattcccaatggctgggcgacagagtcatcaccaccagcacccgaacctgggccctgcccacctacaacaaccacctctacaagcaaatctccagccaatcaggagcatcgaacgacaaccactactttggccacagcaccccttgggggtattttgacttcaacagattccactgtcacttctccccacgtgactggcaaagactcatcaacaacaactggggattccgacccaagagactcaacttcaagctctttaacattcaagtcaaagaggtcacgcagaatgacggtacgacgacgattgccaataaccttaccagcacggttcaggtgtttactgactcggagtaccagctcccgtacgtcctcggctcggcgcatcaaggatgcctcccgccgttcccagcagacgtcttcatggtcccacagtatggatacctcaccctgaacaacgggagtcaggcggtaggacgctcttccttttactgcctggagtactttccttctcagatgcttcgtaccggaaacaactttaccttcagctacacctttgaagacgcgcctttccacagtagctacgctcacagccagagtctggatcggctgatgaatcctcttatcgaccagtacctgtattatctaaacaaaacaaacaatcaaagtggaaccttcacgcagtctcggctactgtttagtcaagctggacccaccagcattctcttcaagtctaaaaactggctgcctggaccttgctacagacaacagcgtctgtcaaagacagcaaacgacaacaacaacagcaactttccctggactgcggctacaaagtatcatctaaatggccgggactcgttggttaatccaggaccagctatggccagccacaaagacgatgaagaaaagttttttccccagcatggaaccctgatatttggtaaacaaggaacaaagctaacagacgcggatttggacaatgtcatgattacagatgaagaagaaatccgcaccaccaatcccgtggctacggagcagtacgggactgtgtcaaataatttgcagaaactcaacatactggcaactactggaactgtcaacacacaaggagcgttacctggtatggtgtggcaggatcgagacgtgtacctgcagggacccatttgggccaagattcctcacaccgatggacactttcatccttctccactgatgggaggttttggactcaaacacccgcctcctcagatcatgatcaaaaacactcccgttccagccaatcctcctacaaacttcagttctgccaagtttgcttccttcatcacacagtattccacgggacaagtcagcgtggagattgagtgggagctgcagaaggagaacagcaaacgctggaaccccgagatccagtacacttccaactacaacaaatctgttaatgtggactttactgtggacactaatggcgtgtattcagagcctcgccccattggcaccagatacctgactcgtaatctgtaa

SEQ ID NO: 4501 - DNA, 2208 bp, Artificial Sequence
  source: /note="Description of Artificial Sequence: Synthetic polynucleotide"
atggctgccgatggttatcttccagattggctcgaggacactctctctgaaggaataagacagtggtggaagctcaaacctggcccaccaccgccaaagcccgcagagcggcacaaggacgccagtaggggtcttgtgcttcctgggtacaagtacctcggacccttcaacggactcgacaaaggagagccggtcaacgaggcagacgccgcggccctcgagcacgacaaggcctacgaccggcagctcgacagcggagacaacccgtacctcaagtacaaccacgccgacgcggagtttcaggagcgtcttaaagaagatacgtcttttgggggcaacctcggacgagcagtattccaggcgaaaaagagggttcttgaacctctgggcctggttgaggagcctgttaagacggctccgggaaaaaagaggccggtagagcactctcctgtggagccagactcctcctcgggaaccggaaaagcgggccagcagcctgcaagaaaaagattgaattttggtcagactggagacgcagactccgtacctgacccccagcctctcggacagccaccagcagcccccacaagtttgggatctactacaatggctacaggcagtggcgcaccaatggcagacaataacgagggtgccgatggagtgggtaattcctcaggaaattggcattgcgattcccaatggctgggcgacagagtcatcaccaccagcacccgaacctgggccctgcccacctacaacaaccacctctacaagcaaatctccagccaatcaggagcatcgaacgacaaccactactttggctacagcaccccttgggggtattttgacttcaacagattccactgtcacttctccccacgtgactggcaaagactcatcaacaacaactggggattccgacccaagagactcaacttcaagctctttaacattcaagtcaaagaggtcacgcagaatgacggtacgacgacgattgccaataaccttaccagcacggttcaggtgtttactgactcggagtaccagctcccgtacgtcctcggctcggcgcatcaaggatgcctcccgccgttcccagcagacgtcttcatggtcccacagtatggatacctcaccctgaacaacgggagtcaggcggtaggacgctcttccttttactgcctggagtactttccttctcagatgcttcgtaccggaaacaactttaccttcagctacacctttgaagacgtgcctttccacagtagctacgctcacagccagagtctggatcggctgatgaatcctcttatcgaccagtacctgtattatctaaacaaaacaaacaatcaaagtggaaccttcacgcagtctcggctactgtttagtcaagctggacccaccagcattctcttcaagtctaaaaactggctgcctggaccttgctacagacaacagcgtctgtcaaagacagcaaacgacaacaacaacagcaactttccctggactgcggctacaaagtatcatctaaatggccgggactcgttggttaatccaggaccagctatggccagccacaaagacgatgaagaaaagttttttcccatgcatggaaccctgatatttggtaaacaaggaacaaagctaacagacgcggatttggacaatgtcatgattacagatgaagaagaaatccgcaccaccaatcccgtggctacggagcagtacgggactgtgtcaaataatttgcagaaactcaacatactggcaactactggaactgtcaacacacaaggagcgttacctggtatggtgtggcaggatcgagacgtgtacctgcagggacccatttgggccaagattcctcacaccgatggacactttcatccttctccactgatgggaggttttggactcaaacacccgcctcctcagatcatgatcaaaaacactcccgttccagccaatcctcctacaaacttcagttctgccaagtttgcttccttcatcacacagtattccacgggacaagtcagcgtggagattgagtgggagctgcagaaggagaacagcaaacgctggaaccccgagatccagtacacttccaactacaacaaatctgttaatgtggactttactgtggacactaatggcgtgtattcagagcctcgccccattggcaccagatacctgactcgtaatctgtaa

SEQ ID NO: 4502 - DNA, 2208 bp, Artificial Sequence
  source: /note="Description of Artificial Sequence: Synthetic polynucleotide"
atggctgccgatggttatcttccagattggctcgaggacactctctctgaaggaataagacagtggtggaagctcaaacctggcccaccaccaccaaagcccgcagagcggcataaggacgacagcaggggtcttgtgcttcctgggtacaagtacctcggacccttcaacggactcgacaagggagagccggtcaacgaggcagacgccgcggccctcgagcacgacaaagcctacgaccggcagctcgacagcggagacaacccgtacctcaagtacaaccacgccgacgcggagtttcaggagcgccttaaagaagatacgtcttttgggggcaacctcggacgagcagtcttccaggcgaaaaagagggttcttgaacctctgggcctggttgaggaacctgttaagacggctccgggaaaaaagaggccggtagagcactctcctgtggagccagactcctcctcgggaaccggaaaggcgggccagcagcctgcaagaaaaagattgaattttggtcagactggagacgcagactcagtacctgacccccagcctctcggacagccaccagcagccccctctggtctgggaactaatacgatggctacaggcagtggcgcaccaatggcagacaataacgagggcgccgacggagtgggtaattcctcgggaaattggcattgcgattccacatggatgggcgacagagtcatcaccaccagcacccgaacctgggccctgcccacctacaacaaccacctctacaagcaaatctccagccaatcaggagcatcgaacgacaaccactactttggctacagcaccccttgggggtattttgacttcaacagattccactgtcacttctccccacgtgactggcaaagactcatcaacaacaactggggattccgacccaagagactcaacttcaagctctttaacattcaagtcaaagaggtcacgcagaatgacggtacgacgacgattgccaataaccttaccagcacggttcaggtgtttactgactcggagtaccagctcccgtacgtcctcggctcggcgcatcaaggatgcctcccgccgttcccagcagacgtcttcatggtcccacagtatggatacctcaccctgaacaacgggagtcaggcggtaggacgctcttccttttactgcctggagtactttccttctcagatgcttcgtaccggaaacaactttaccttcagctacacctttgaagacgtgcctttccacagtagctacgctcacagccagagtctggatcggctgatgaatcctcttatcgaccagtacctgtattatctaaacaaaacaaacaatcaaagtggaaccttcacgcagtctcggctactgtttagtcaagctggacccaccagcattctcttcaagtctaaaaactggctgcctggaccttgctacagacaacagcgtctgtcaaagacagcaaacgacaacaacaacagcaactttccctggactgcggctacaaagtatcatctaaatggccgggactcgttggttaatccaggaccagctatggccagccacaaagacgatgaagaaaagttttttccccagcatggaaccctgatatttggtaaacaaggaacaaagctaacagacgcggatttggacaatgtcatgattacagatgaagaagaaatccgcaccaccaatcccgtggctacggagcagtacgggactgtgtcaaataatttgcagaaactcaacatactggcaactactggaactgtcaacacacaaggagcgttacctggtatggtgtggcaggatcgagacgtgtacctgcagggacccatttgggccaagattcctcacaccgatggacactttcatccttctccactgatgggaggttttggactcaaacacccgcctcctcagatcatgatcaaaaacactcccgttccagccaatcctcctacaaacttcagttctgccaagtttgcttccttcatcacacagtattccacgggacaagtcagcgtggagattgagtgggagctgcagaaggagaacagcaaacgctggaaccccgagatccagtacacttccaactacaacaaatctgttaatgtggactttactgtggacactaatggcgtgtattcagagcctcgccccattggcaccagatacctgactcgtaatctgtaa

SEQ ID NO: 4503 - DNA, 2208 bp, Artificial Sequence
  source: /note="Description of Artificial Sequence: Synthetic polynucleotide"
atggctgccgatggttatcttccagattggctcgaggacactctctctgaaggaataagacagtggtggaagctcaaacctggcccaccaccgccaaagcccgcagagcggcacaaggacgacagtaggggtcttgtgcttcctgggtacaagtacctcggacccttcaacggactcgacaaaggagagccggtcaacgaggcagacgccgcggccctcgagcacgacaaggcctacgaccggcagctcgacagcggagacaacccgtacctcaagtacaaccacgccgacgcggagtttcaggagcgtcttaaagaagatacgtcttttgggggcaacctcggacgagcagtattccaggcgaaaaagagggttcttgaacctctgggcctggttgaggagcctgttaagacggctccgggaaaaaagaggccggtagagcactctcctgtggagccagactcctcctcgggaaccggaaaagcgggccagcagcctgcaagaaaaagattgaattttggtcagactggagacgcagactccgtacctgacccccagcctctcggacagccaccagcagcccccacaagtttgggatctactacaatggctacaggcagtggcgcaccaatggcagacaataacgagggtgccgatggagtgggtaattcctcaggaaattggcattgcgattcccaatggctgggcgacagagtcatcaccaccagcacccgaacctgggccctgcccacctacaacaaccacctctacaagcaaatctccagccaatcaggagcatcgaacgacaaccactactttggccacagcaccccttgggggtattttgacttcaacagattccactgtcacttctccccacgtgactggcaaagactcatcaacaacaactggggattccgacccaagagactcaacttcaagctctttaacattcaagtcaaagaggtcacgcagaatgacggtacgacgacgattgccaataaccttaccagcacggttcaggtgtttactgactcggagtaccagctcccgtacgtcctcggctcggcgcatcaaggatgcctcccgccgttcccagcagacgtcttcatggtcccacagtatggatacctcaccctgaacaacgggagtcaggcggtaggacgctcttccttttactgcctggagtactttccttctcagatgcttcgtaccggaaacaactttaccttcagctacacctttgaagacgtgcctttccacagtagctacgctcacagccagagtctggatcggctgatgaatcctcttatcgaccagtacctgtattatctaaacaaaacaaacaatcaaagtggaaccttcacgcagtctcggctactgtttagtcaagctggacccaccagcattctcttcaagtctaaaaactggctgcctggaccttgctacagacaacagcgtctgtcaaagacagcaaacgacaacaacaacagcaactttccctggactgcggctacaaagtatcatctaaatggccgggactcgttggttaatccaggaccagctatggccagccacaaagacgatgaagaaaagttttttcccatgcatggaaccctgatatttggtaaacaaggaacaaagctaacagacgcggatttggacaatgtcatgattacagatgaagaagaaatccgcaccaccaatcccgtggctacggagcagtacgggactgtgtcaaataatttgcagaaactcaacatactggcaactactggaactgtcaacacacaaggagcgttacctggtatggtgtggcaggatcgagacgtgtacctgcagggacccatttgggccaagattcctcacaccgatggacactttcatccttctccactgatgggaggttttggactcaaacacccgcctcctcagatcatgatcaaaaacactcccgttccagccaatcctcctacaaacttcagttctgccaagtttgcttccttcatcacacagtattccacgggacaagtcagcgtggagattgagtgggagctgcagaaggagaacagcaaacgctggaaccccgagatccagtacacttccaactacaacaaatctgttaatgtggactttactgtggacactaatggcgtgtattcagagcctcgccccattggcaccagatacctgactcgtaatctgtaa

SEQ ID NO: 4504 - DNA, 2208 bp, Artificial Sequence
  source: /note="Description of Artificial Sequence: Synthetic polynucleotide"
atggctgccgatggttatcttccagattggctcgaggacactctctctgaaggaataagacagtggtggaagctcaaacctggcccaccaccgccaaagcccgcagagcggcacaaggacgacagtaggggtcttgtgcttcctgggtacaagtacctcggacccttcaacggactcgacaaaggagagccggtcaacgaggcagacgccgcggccctcgagcacgacaaggcctacgaccggcagctcgacagcggagacaacccgtacctcaagtacaaccacgccgacgcggagtttcaggagcgtcttaaagaagatacgtcttttgggggcaacctcggacgagcagtattccaggcgaaaaagagggttcttgaacctctgggcctggttgaggagcctgttaagacggctccgggaaaaaagaggccggtagagcactctcctgtggagccagactcctcctcgggaaccggaaaagcgggccagcagcctgcaagaaaaagattgaattttggtcagactggagacgcagactccgtacctgacccccagcctctcggacagccaccagcagcccccacaagtttgggatctactacaatggctacaggcagtggcgcaccaatggcagacaataacgagggtgccgatggagtgggtaattcctcaggaaattggcattgcgattcccaatggctgggcgacagagtcatcaccaccagcacccgaacctgggccctgcccacctacaacaaccacctctacaagcaaatctccagccaatcaggagcatcgaacgacaaccactactttggctacagcaccccttgggggtattttgacttcaacagattccactgtcacttctccccacgtgactggcaaagactcatcaacaacaactggggattccgacccaagagactcaacttcaagctctttaacattcaagtcaaagaggtcacgcagaatgacggtacgacgacgattgccaataaccttaccagcacggttcaggtgtttactgactcggagtaccagctcccgtacgtcctcggctcggcgcatcaaggatgcctcccgccgttcccagcagacgtcttcatggtcccacagtatggatacctcaccctgaacaacgggagtcaggcggtaggacgctcttccttttactgcctggagtactttccttctcagatgcttcgtaccggaaacaactttaccttcagctacacctttgaagacgtgcctttccacagtagctacgctcacagccagagtctggatcggctgatgaatcctcttatcgaccagtacctgtattatctaaacaaaacaaacaatcaaagtggaaccttcacgcagtctcggctactgtttagtcaagctggacccaccagcattctcttcaagtctaaaaactggctgcctggaccttgctacagacaacagcgtctgtcaaagacagcaaacgacaacaacaacagcaactttccctggactgcggctacaaagtatcatctaaatggccgggactcgttggttaatccaggaccagctatggccagccacaaagacgatgaagaaaagttttttccccagcatggaaccctgatatttggtaaacaaggaacaaagctaacagacgcggatttggacaatgtcatgattacagatgaagaagaaatccgcaccaccaatcccgtggctacggagcagtacgggactgtgtcaaataatttgcagaaactcaacatactggcaactactggaactgtcaacacacaaggagcgttacctggtatggtgtggcaggatcgagacgtgtacctgcagggacccatttgggccaagattcctcacaccgatggacactttcatccttctccactgatgggaggttttggactcaaacacccgcctcctcagatcatgatcaaaaacactcccgttccagccaatcctcctacaaacttcagttctgccaagtttgcttccttcatcacacagtattccacgggacaagtcagcgtggagattgagtgggagctgcagaaggagaacagcaaacgctggaaccccgagatccagtacacttccaactacaacaaatctgttaatgtggactttactgtggacactaatggcgtgtattcagagcctcgccccattggcaccagatacctgactcgtaatctgtaa

SEQ ID NO: 4505 - DNA, 2208 bp, Artificial Sequence
  source: /note="Description of Artificial Sequence: Synthetic polynucleotide"
atggctgccgatggttatcttccagattggctcgaggacactctctctgaaggaataagacagtggtggaagctcaaacctggcccaccaccgccaaagcccgcagagcggcacaaggacgccagtaggggtcttgtgcttcctgggtacaagtacctcggacccttcaacggactcgacaaaggagagccggtcaacgaggcagacgccgcggccctcgagcacgacaaggcctacgaccggcagctcgacagcggagacaacccgtacctcaagtacaaccacgccgacgcggagtttcaggagcgtcttaaagaagatacgccttttgggggcaacctcggacgagcagtattccaggcgaaaaagagggttcttgaacctctgggcctggttgaggagcctgttaagacggctccgggaaaaaagaggccggtagagcactctcctgtggagccagactcctcctcgggaaccggaaaagcgggccagcggcctgcaagaaaaagattgaattttggtcagactggagacgcagactccgtacctgacccccagcctctcggacagccaccagcagcccccacaagtttgggatctactacaatggctacaggcagtggcgcaccaatggcagacaataacgagggtgccgatggagtgggtaattcctcaggaaattggcattgcgattcccaatggctgggcgacagagtcatcaccaccagcacccgaacctgggccctgcccacctacaacaaccacctctacaagcaaatccccagccaatcaggagcatcgaacgacaaccactactttggctacagcaccccttgggggtattttgacttcaacagattccactgtcacttctccccacgtgactggcaaagactcatcaacaacaactggggattccgacccaagagactcaacttcaagctctttaacattcaagtcaaagaggtcacgcagaatgacggtacgacgacgattgccaataaccttaccagcacggttcaggtgtttactgactcggagtaccagctcccgtacgtcctcggctcggcgcatcaaggatgcctcccgccgttcccagcagacgtcttcatggtcccacagtatggatacctcaccctgaacaacgggagtcaggcggtaggacgctcttccttttactgcctggagtactttccttctcagatgcttcgtaccggaaacaactttaccttcagctacacctttgaagacgtgcctttccacagtagctacgctcacagccagagtctggatcggctgatgaatcctcttatcgaccagtacctgtattatctaaacaaaacaaacaatcaaagtggaaccttcacgcagtctcggctactgtttagtcaagctggacccaccagcattctcttcaagtctaaaaactggctgcctggaccttgctacagacaacagcgtctgtcaaagacagcaaacgacaacaacaacagcaactttccctggactgcggctacaaagtatcatctaaatggccgggactcgttggttaatccaggaccagctatggccagccacaaagacgatgaagaaaagttttttccccaacatggaaccctgatatttggtaaacaaggaacaaagctaacagacgcggatttggacaatgtcatgattacagatgaagaagaaatccgcaccaccaatcccgtggctacggagcagtacgggactgtgtcaaataatttgcagaaactcaacatactggcaactactggaactgtcaacacacaaggagcgttacctggtatggtgtggcaggatcgagacgtgtacctgcagggacccatttgggccaagattcctcacaccgatggacactttcatccttctccactgatgggaggttttggactcaaacacccgcctcctcagatcatgatcaaaaacactcccgttccagccaatcctcctacaaacttcagttctgccaagtttgcttccttcatcacacagtattccacgggacaagtcagcgtggagattgagtgggagctgcagaaggagaacagcaaacgctggaaccccgagatccagtacacttccaactacaacaaatctgttaatgtggactttactgtggacactaatggcgtgtattcagagcctcgccccattggcaccagatacctgactcgtaatctgtaa

SEQ ID NO: 4506 - DNA, 2208 bp, Artificial Sequence
  source: /note="Description of Artificial Sequence: Synthetic polynucleotide"
atggctgccgatggttatcttccagattggctcgaggacactctctctgaaggaataagacagtggtggaagctcaaacctggcccaccaccaccaaagcccgcagagcggcataaggacgacagcaggggtcttgtgcttcctgggtacaagtacctcggacccttcaacggactcgacaagggagagccggtcaacgaggcagacgccgcggccctcgagcacgacaaagcctacgaccggcagctcgacagcggagacaacccgtacctcaagtacaaccacgccgacgcggagtttcaggagcgccttaaagaagatacgtcttttgggggcaacctcggacgagcagtcttccaggcgaaaaagagggttcttgaacctctgggcctggttgaggaacctgttaagacggctccgggaaaaaagaggccggtagagcactctcctgtggagccagactcctcctcgggaaccggaaaggcgggccagcagcctgcaagaaaaagattgaattttggtcagactggagacgcagactcagtacctgacccccagcctctcggacagccaccagcagccccctctggtctgggaactaatacgatggctacaggcagtggcgcaccaatggcagacaataacgagggcgccgacggagtgggtaattcctcgggaaattggcattgcgattccacatggatgggcgacagagtcatcaccaccagcacccgaacctgggccctgcccacctacaacaaccacctctacaaacaaatttccagccaatcaggagcctcgaacgacaatcactactttggctacagcaccccttgggggtattttgacttcaacagattccactgccacttttcaccacgtgactggcaaagactcatcaacaacaactggggattccgacccaagagactcaacttcaagctctttaacattcaagtcaaagaggtcacgcagaatgacggtacgacgacgattgccaataaccttaccagcacggttcaggtgtttactgactcggagtaccagctcccgtacgtcctcggctcggcgcatcaaggatgcctcccgccgttcccagcagacgtcttcatggtcccacagtatggatacctcaccctgaacaacgggagtcaggcggtaggacgctcttccttttactgcctggagtactttccttctcagatgcttcgtaccggaaacaactttaccttcagctacacctttgaagacgcgcctttccacagtagctacgctcacagccagagtctggatcggctgatgaatcctcttatcgaccagtacctgtattatctaaacaaaacaaacaatcaaagtggaaccttcacgcagtctcggctactgtttagtcaagctggacccaccagcattctcttcaagtctaaaaactggctgcctggaccttgctacagacaacagcgtctgtcaaagacagcaaacgacaacaacaacagcaactttccctggactgcggctacaaagtatcatctaaatggccgggactcgttggttaatccaggaccagctatggccagccacaaagacgatgaagaaaagttttttccccagcatggaaccctgatatttggtaaacaaggaacaaagctaacagacgcggatttggacaatgtcatgattacagatgaagaagaaatccgcaccaccaatcccgtggctacggagcagtacgggactgtgtcaaataatttgcagaaactcaacatactggcaactactggaactgtcaacacacaaggagcgttacctggtatggtgtggcaggatcgagacgtgtacctgcagggacccatttgggccaagattcctcacaccgatggacactttcatccttctccactgatgggaggttttggactcaaacacccgcctcctcagatcatgatcaaaaacactcccgttccagccaatcctcctacaaacttcagttctgccaagtttgcttccttcatcacacagtattccacgggacaagtcagcgtggagattgagtgggagctgcagaaggagaacagcaaacgctggaaccccgagatccagtacacttccaactacaacaaatctgttaatgtggactttactgtggacactaatggcgtgtattcagagcctcgccccattggcaccagatacctgactcgtaatctgtaa

SEQ ID NO: 4507 - DNA, 2208 bp, Artificial Sequence
  source: /note="Description of Artificial Sequence: Synthetic polynucleotide"
atggctgccgatggttatcttccagattggctcgaggacattctctctgaaggaataagacagtggtggaagctcaaacctggcccaccaccgccaaagcccgcagagcggcacaaggacgccagtaggggtcttgtgcttcctgggtacaagtacctcggacccttcaacggactcgacaaaggagagccggtcaacgaggcagacgccgcggccctcgagcacgacaaggcctacgaccggcagctcgacagcggagacaacccgtacctcaagtacaaccacgccgacgcggagtttcaggagcgtcttaaagaagatacgtcttttgggggcaacctcggacgagcagtattccaggcgaaaaagagggttcttgaacctctgggcctggttgaggagcctgttaagacggctccgggaaaaaagaggccggtagagcactctcctgtggagccagactcctcctcgggaaccggaaaagcgggccagcagcctgcaagaaaaagattgaattttggtcagactggagacgcagactccgtacctgacccccagcctctcggacagccaccagcagcccccacaagtttgggatctactacaatggctacaggcagtggcgcaccaatggcagacaataacgagggtgccgatggagtgggtaattcctcaggaaattggcattgcgattcccaatggctgggcgacagagtcatcaccaccagcacccgaacctgggccctgcccacctacaacaaccacctctacaagcaaatctccagccaatcaggagcatcgaacgacaaccactactttggctacagcaccccttgggggtattttgacttcaacagattccactgtcacttctccccacgtgactggcaaagactcatcaacaacaactggggattccgacccaagagactcaacttcaagctctttaacattcaagtcaaagaggtcacgcagaatgacggtacgacgacgattgccaataaccttaccagcacggttcaggtgtttactgactcggagtaccagctcccgtacgtcctcggctcggcgcatcaaggatgcctcccgccgttcccagcagacgtcttcatggtcccacagtatggatacctcaccctgaacaacgggagtcaggcggtaggacgctcttccttttactgcctggagtactttccttctcagatgcttcgtaccggaaacaactttaccttcagctacacctttgaagacgtgcctttccacagtagctacgctcacagccagagtctggatcggctgatgaatcctcttatcgaccagtacctgtattatctaaacaaaacaaacaatcaaagtggaaccttcacgcagtctcggctactgtttagtcaagctggacccaccagcattctcttcaagtctaaaaactggctgcctggaccttgctacagacaacagcgtctgtcaaagacagcaaacgacaacaacaacagcaactttccctggactgcggctacaaagtatcatctaaatggccgggactcgttggttaatccaggaccagctatggccagccacaaagacgatgaagaaaagttttttccccagcatggaaccctgatatttggtaaacaaggaacaaagctaacagacgcggatttggacaatgtcatgattacagatgaagaagaaatccgcaccaccaatcccgtggctacggagcagtacgggactgtgtcaaataatttgcagaaactcaacatactggcaactactggaactgtcaacacacaaggagcgttacctggtatggtgtggcaggatcgagacgtgtacctgcagggacccatttgggccaagattcctcacaccgatggacactttcatccttctccactgatgggaggttttggactcaaacacccgcctcctcagatcatgatcaaaaacactcccgttccagccaatcctcctacaaacttcagttctgccaagtttgcttccttcatcacacagtattccacgggacaagtcagcgtggagattgagtgggagctgcagaaggagaacagcaaacgctggaaccccgagatccagtacacttccaactacaacaaatctgttaatgtggactttactgtggacactaatggcgtgtattcagagcctcgccccattggcaccagatacctgactcgtaatctgtaa

SEQ ID NO: 4508 - DNA, 2208 bp, Artificial Sequence
  source: /note="Description of Artificial Sequence: Synthetic polynucleotide"
atggctgccgatggttatcttccagattggctcgaggacattctctctgaaggaataagacagtggtggaagctcaaacctggcccaccaccgccaaagcccgcagagcggcacaaggacgccagtaggggtcttgtgcttcctgggtacaagtacctcggacccttcaacggactcgacaaaggagagccggtcaacgaggcagacgccgcggccctcgagcacgacaaggcctacgaccggcagctcgacagcggagacaacccgtacctcaagtacaaccacgccgacgcggagtttcaggagcgtcttaaagaagatacgtcttttgggggcaacctcggacgagcagtattccaggcgaaaaagagggttcttgaacctctgggcctggttgaggagcctgttaagacggctccgggaaaaaagaggccggtagagcactctcctgtggagccagactcctcctcgggaaccggaaaagcgggccagcagcctgcaagaaaaagattgaattttggtcagactggagacgcagactccgtacctgacccccagcctctcggacagccaccagcagcccccacaagtttgggatctactacaatggctacaggcagtggcgcaccaatggcagacaataacgagggtgccgatggagtgggtaattcctcaggaaattggcattgcgattcccaatggctgggcgacagagtcatcgccaccagcacccgaacctgggccctgcccacctacaacaaccacctctacaagcaaatctccagccaatcaggagcatcgaacgacaaccactactttggctacagcaccccttgggggtattttgacttcaacagattccactgtcacttctccccacgtgactggcaaagactcatcaacaacaactggggattccgacccaagagactcaacttcaagctctttaacattcaagtcaaagaggtcacgcagaatgacggtacgacgacgattgccaataaccttaccagcacggttcaggtgtttactgactcggagtaccagctcccgtacgtcctcggctcggcgcatcaaggatgcctcccgccgttcccagcagacgtcttcatggtcccacagtatggatacctcaccctgaacaacgggagtcaggcggtaggacgctcttccttttactgcctggagtactttccttctcagatgcttcgtaccggaaacaactttaccttcagctacacctttgaagacgtgcctttccacagtagctacgctcacagccagagtctggatcggctgatgaatcctcttatcgaccagtacctgtattatctaaacaaaacaaacaatcaaagtggaaccttcacgcagtctcggctactgcttagtcaagctggacccaccagcattctcttcaagtctaaaaactggctgcctggaccttgctacagacaacagcgtctgtcaaagacagcaaacgacaacaacaacagcaactttccctggactgcggctacaaagtatcatctaaatggccgggactcgttggttaatccaggaccagctatggccagccacaaagacgatgaagaaaagttttttccccaacatggaaccctgatatttggtaaacaaggaacaaagctaacagacgcggatttggacaatgtcatgattacagatgaagaagaaatccgcaccaccaatcccgtggctacggagcagtacgggactgtgtcaaataatttgcagaaactcaacatactggcaactactggaactgtcaacacacaaggagcgttacctggtatggtgtggcaggatcgagacgtgtacctgcagggacccatttgggccaagattcctcacaccgatggacactttcatccttctccactgatgggaggttttggactcaaacacccgcctcctcagatcatgatcaaaaacactcccgttccagccaatcctcctacaaacttcagttctgccaagtttgcttccttcatcacacagtattccacgggacaagtcagcgtggagattgagtgggagctgcagaaggagaacagcaaacgctggaaccccgagatccagtacacttccaactacaacaaatctgttaatgtggactttactgtggacactaatggcgtgtattcagagcctcgccccattggcaccagatacctgactcgtaatctgtaa

SEQ ID NO: 4509 - DNA, 2208 bp, Artificial Sequence
  source: /note="Description of Artificial Sequence: Synthetic polynucleotide"
atggctgccgatggttatcttccagattggctcgaggacactctctctgaaggaataagacagtggtggaagctcaaacctggcccaccaccgccaaagcccgcagagcggcacaaggacgccagtaggggtcttgtgcttcctgggtacaagtacctcggacccttcaacggactcgacaaaggagagccggtcaacgaggcagacgccgcggccctcgagcacgacaaggcctacgaccggcagctcgacagcggagacaacccgtacctcaagtacaaccacgccgacgcggagtttcaggagcgtcttaaagaagatacgccttttgggggcaacctcggacgagcagtattccaggcgaaaaagagggttcttgaacctctgggcctggttgaggagcctgttaagacggctccgggaaaaaagaggccggtagagcactctcctgtggagccagactcctcctcgggaaccggaaaagcgggccagcagcctgcaagaaaaagattgaattttggtcagactggagacgcagactccgtacctgacccccagcctctcggacagccaccagcagcccccacaagtttgggatctactacaatggctacaggcagtggcgcaccaatggcagacaataacgagggtgccgatggagtgggtaattcctcaggaaattggcattgcgattcccaatggctgggcgacagagtcatcaccaccagcacccgaacctgggccctgcccacctacaacaaccacctctacaagcaaatccccagccaatcaggagcatcgaacgacaaccactactttggctacagcaccccttgggggtattttgacttcaacagattccactgtcacttctccccacgtgactggcaaagactcatcaacaacaactggggattccgacccaagagactcaacttcaagctctttaacattcaagtcaaagaggtcacgcagaatgacggtacgacgacgattgccaataaccttaccagcacggttcaggtgtttactgactcggagtaccagctcccgtacgtcctcggctcggcgcatcaaggatgcctcccgccgttcccagcagacgtcttcatggtcccacagtatggatacctcaccctgaacaacgggagtcaggcggtaggacgctcttccttttactgcctggagtactttccttctcagatgcttcgtaccggaaacaactttaccttcagctacacctttgaagacgtgcctttccacagtagctacgctcacagccagagtctggatcggctgatgaatcctcttatcgaccagtacctgtattatctaaacaaaacaaacaatcaaagtggaaccttcacgcagtctcggctactgtttagtcaagctggacccaccagcattctcttcaagtctaaaaactggctgcctggaccttgctacagacaacagcgtctgtcaaagacagcaaacgacaacaacaacagcaactttccctggactgcggctacaaagtatcatctaaatggccgggactcgttggttaatccaggaccagctatggccagccacaaagacgatgaagaaaagttttttccccaacatggaaccctgatatttggtaaacaaggaacaaagctaacagacgcggatttggacaatgtcatgattacagatgaagaagaaatccgcaccaccaatcccgtggctacggagcagtacgggactgtgtcaaataatttgcagaaactcaacatactggcaactactggaactgtcaacacacaaggagcgttacctggtatggtgtggcaggatcgagacgtgtacctgcagggacccatttgggccaagattcctcacaccgatggacactttcatccttctccactgatgggaggttttggactcaaacacccgcctcctcagatcatgatcaaaaacactcccgttccagccaatcctcctacaaacttcagttctgccaagtttgcttccttcatcacacagtattccacgggacaagtcagcgtggagattgagtgggagctgcagaaggagaacagcaaacgctggaaccccgagatccagtacacttccaactacaacaaatctgttaatgtggactttactgtggacactaatggcgtgtattcagagcctcgccccattggcaccagatacctgactcgtaatctgtaa

SEQ ID NO: 4510 - DNA, 2208 bp, Artificial Sequence
  source: /note="Description of Artificial Sequence: Synthetic polynucleotide"
atggctgccgatggttatcttccagattggctcgaggacactctctctgaaggaataagacagtggtggaagctcaaacctggcccaccaccaccaaagcccgcagagcggcataaggacgacagcaggggtcttgtgcttcctgggtacaagtacctcggacccttcaacggactcgacaagggagagccggtcaacgaggcagacgccgcggccctcgagcacgacaaagcctacgaccggcagctcgacagcggagacaacccgtacctcaagtacaaccacgccgacgcggagtttcaggagcgccttaaagaagatacgtcttttgggggcaacctcggacgagcagtcttccaggcgaaaaagagggttcttgaacctctgggcctggttgaggaacctgttaagacggctccgggaaaaaagaggccggtagagcactctcctgtggagccagactcctcctcgggaaccggaaaggcgggccagcagcctgcaagaaaaagattgaawtttggtcagactggagacgcagactcagtacctgacccccagcctctcggacagccaccagcagccccctctggtctsggaactaatacgatggctacaggcagtggcgcaccaatggcagacaataacgagggcgccgacgkagtgggtaattcctcgggaaattggcattgcgattccacatggatgggcgacagagtcatcaccaccagcacccgaacctgggccctgcccacctacaacaaccacctctacaaacaaatttccagccaatcaggagcctcgaacgacaatcactactttggctacagcaccccttgggggtattttgacttcaacagattccactgccacttttcaccacgtgactggcaaagactcatcaacaacaactggggattccgacccaagagactcaacttcaagctctttaacattcaagtcaaagaggtcacgcagaatgacggtacgacgacgattgccaataaccttaccagcacggttcaggtgtttactgactcggagtaccagctcccgtacgtcctcggctcggcgcatcaaggatgcctcccgccgttcccagyagacgtcttcatggtgccacagtatggatacctcaccctgaacaacgggagtcaggcagtaggacgctcttcattttactgcctggagtactttccttctcagatgctgcgtaccggaaacaactttaccttcagctacacttttgaggacgttcctttccacagcagctacgctcacagccagagtctggaycgkctsatgaatcctctyatcgaccagtacctgtattatctaaacaaaacaaacaatcaaagtggaaccttcacgcagtctcggctactgtttagtcaagctggacccaccagcattctcttcaagtctaaaaactggctgcctggaccttgctacagacaacagcgtctgtcaaagacagcaaacgacaacaacaacagcaamtttccctggactgcggctacaaagtatcatctaaatggccgggactcgttggttaatccaggaccagctatggccagccacaaagacgatgaagaaaagttttttcccatgcatggaaccytgatatttggtaaacaaggaacaaagctaacagacgcggatttggacaatgtcrtgattacagatgaagaagaaatccgcaccaccaatcccgtggctacggagcagtacgggactgtgtcaaataatttgcagaaactcaacatactgscaactactggaactgtcaacwcacaaggagcgttacctggtatggtgtggcaggatcgagacgtgtacctgcagggacccatttgggccaagattcctcacaccgatggacactttcacccttctccactgatgggaggttttggactcaaacacccgcctcctcagatcatgatcaaaaacactccsgttccagcsaatcctcctacaaacttcagttatgcaaagtttgcttccttcatcacacagtattccacgggacaagtcagcgtggagatggagtgggagctgcagaaggagaacagcaaacgctggaaccccgagattccatacacttccaaatacaacaaatctgttaatgtggactttactgtggacactaatggcgtgtattcagagcctcgccccattggcacccgatacctgactcgtaatctgtaa

SEQ ID NO: 4511 - DNA, 2208 bp, Artificial Sequence
  source: /note="Description of Artificial Sequence: Synthetic polynucleotide"
atggctgccgatggttatcttccagattggctcgaggacactctctctgaaggaataagacagtggtggaagctcaaacctggcccaccaccaccaaagcccgcagagcggcatcaggacgacagcaggggtcttgtgcttcctgggtacaagtacctcggacccttcaacggactcgacaaaggagagccggtcaacgaggcagacgctgcggccctcgagcacgacaaggcctacgaccggcagctcgacagcggagacaacccgtacctcaagtacaaccacgccgacgcggagtttcaggagcgtcttaaagaagatacgtcttttgggggcaacctcggacgagcagtcttccaggcgaaaaagagggttcttgaacctctgggcctggttgaggaacctgttaagacggctccgggaaaaaagaggccggtagagcactctcctgcggagccagactcctcctcgggaaccggaaaagcgggccagcagcctgcaagaaagagattgaatttcggtcagactggagacgcagactccgtacctgacccccagcctctcggacagccaccagcagcccccacaagtttgggatctactacaatggctacaggcagtggcgcaccaatggcagacaataacgagggtgccgatggagtgggtaattcctcaggaaattggcattgcgattcccaatggctgggcgacagagtcatcaccaccagcacccgaacctgggccctgcccacctacaacaaccacctctacaagcaaatctccagccaatcaggagcatcgaacgacaaccactactttggctacagcaccccttgggggtattttgacttcaacagattccactgtcacttctccccacgtgactggcaaagactcatcaacaacaactggggattccgacccaagagactcaacttcaagctctttaacattcaagtcaaagaggtcacgcagaatgacggtacgacgacgattgccaataaccttaccagcacggttcaggtgtttactgactcggagtaccagctcccgtacgtcctcggctcggcgcatcaaggatgcctcccgccgtttccagcggacgtcttcatggtcccacagtatggatacctcaccctgaacaacgggagtcaggcggtaggacgctcttccttttactgcctggagtactttccttctcagatgctgcgtaccggaaacaactttaccttcagctacacctttgaggacgtgcctttccacagcagctacgctcacagccagagtttggaccggctgatgaatcctctgatcgaccagtatctgtattatctgaacaggacacaatcaaatagtggaactcttcagcagtctaggctactgtttagccaagctggacccaccagcatgtctcttcaagctaaaaactggctgcctggaccttgctacagacagcagcgtctgtcaaagcaggcaaacgacaacaacaacagcaactttccctggactgcggctacaaagtatcatctaaatggtcgggactcgttggttaatccaggaccagctatggccagccacaaagacgatgaagaaaagtttttccccatgcatggaaccctgatatttggtaaacaaggaacaaatgctaacgacgcggatttggaacatgtcatgattacagatgaagaagaaatcaggaccaccaatcccgtggctacagagcagtacggaaacgtgtcaaataatttgcaaaactcaaatactggtccaactacagaaaatgtcaatcaccagggagcgttacctggtatggtgtggcaggatcgagacgtgtacctgcagggacccatttgggccaagattcctcacaccgacggacactttcacccttctccactgatgggaggttttggactcaaacacccgcctcctcaaatcatgatcaaaaacactcctgttccagccaatcctcctacaaacttcagcgcggcaaagtttgcttccttcatcacacagtattccacgggacaggccagcgtggagatcgagtgggagctgcagaaggagaacagcaaacgctggaaccccgagatccagtacacttccaactacaacaaatctgttaatgtggactttactgtggacactaatggtgtgtattcagagcctcgccccattggcaccagatacctgactcgtaatctgtaa

SEQ ID NO: 4512 - DNA, 2208 bp, Artificial Sequence
  source: /note="Description of Artificial Sequence: Synthetic polynucleotide"
atggctgccgatggttatcttccagattggctcgaggacactctctctgaaggaataagacagtggtggaagctcaaacctggcccaccaccgccaaagcccgcagagcggcacaaggacgacagtaggggtcttgtgcttcctgggtacaagtacctcggacccttcaacggactcgacaaaggagagccggtcaacgaggcagacgccgcggccctcgagcacgacaaggcctacgaccggcagctcgacagcggagacaacccgtacctcaagtacaaccacgccgacgcggagtttcaggagcgtcttaaagaagatacgtcttttgggggcaacctcggacgagcagtattccaggcgaaaaagagggttcttgaacctctgggcctggttgaggagcctgttaagacggctccgggaaaaaagaggccggtagagcactctcctgtggagccagactcctcctcgggaaccggaaaagcgggccagcagcctgcaagaaaaagattgaattttggtcagactggagacgcagactccgtacctgacccccagcctctcggacagccaccagcagcccccacaagtttgggatctactacaatggctacaggcagtggcgcaccaatggcagacaataacgagggtgccgatggagtgggtaattcctcaggaaattggcattgcgattcccaatggctgggcgacagagtcatcaccaccagcacccgaacctgggccctgcccacctacaacaaccacctctacaagcaaatctccagccaatcaggagcatcgaacgacaaccactactttggccacagcaccccttgggggtattttgacttcaacagattccactgtcacttctccccacgtgactggcaaagactcatcaacaacaactggggattccgacccaagagactcaacttcaagctctttaacattcaagtcaaagaggtcacgcagaatgacggtacgacgacgattgccaataaccttaccagcacggttcaggtgtttactgactcggagtaccagctcccgtacgtcctcggctcggcgcatcaaggatgcctcccgccgttcccagcagacgtcttcatggtcccacagtatggatacctcaccctgaacaacgggagtcaggcggtaggacgctcttccttttactgcctggagtactttccttctcagatgcttcgtaccggaaacaactttaccttcagctacacctttgaagacgtgcctttccacagtagctacgctcacagccagagtctggatcggctgatgaatcctcttatcgaccagtacctgtattatctaaacaaaacacaatcaaatagtggaactcttcagcagtctcggctactgtttagtcaagctggacccaccagcatgcctcttcaagctaaaaactggctgcctggaccttgctacagacaacagcgtctgtcaaagcaggcaaacgacaacaacaacagcaactttccctggactgcggctacaaagtatcatctaaatggccgggactcgttggttaatccaggaccagctatggccagccacaaagacgatgaagaaaagtttttccccatgcatggaaccctgatatttggtaaacaaggaacaaatgctaacgacgcggatttggacaatgtcatgattacagatgaagaagaaatccgcaccaccaatcccgtggctacggagcagtacgggactgtgtcaaataatttgcaaaactcaaatactggtccaactactggaactgtcaatcaccaaggagcgttacctggtatggtgtggcaggatcgagacgtgtacctgcagggacccatttgggccaagattcctcacaccgatggacactttcatccttctccactgatgggaggttttggactcaaacacccgcctcctcagatcatgatcaaaaacactcccgttccagccaatcctcctacaaacttcagttctgccaagtttgcttccttcatcacacagtattccacgggacaagtcagcgtggagattgagtgggagctgcagaaggagaacagcaaacgctggaaccccgagatccagtacacttccaactacaacaaatctgttaatgtggactttactgtggacactaatggcgtgtattcagagcctcgccccattggcaccagatacctgactcgtaatctgtaa

SEQ ID NO: 4513 - DNA, 2208 bp, Artificial Sequence
  source: /note="Description of Artificial Sequence: Synthetic polynucleotide"
atggctgccgatggttatcttccagattggctcgaggacactctctctgaaggaataagacagtggtggaagctcaaacctggcccaccaccgccaaagcccgcagagcggcacaaggacgacagtaggggtcttgtgcttcctgggtacaagtacctcggacccttcaacggactcgacaaaggagagccggtcaacgaggcagacgccgcggccctcgagcacgacaaggcctacgaccggcagctcgacagcggagacaacccgtacctcaagtacaaccacgccgacgcggagtttcaggagcgtcttaaagaagatacgtcttttgggggcaacctcggacgagcagtattccaggcgaaaaagagggttcttgaacctctgggcctggttgaggagcctgttaagacggctccgggaaaaaagaggccggtagagcactctcctgtggagccagactcctcctcgggaaccggaaaagcgggccagcagcctgcaagaaaaagattgaattttggtcagactggagacgcagactccgtacctgacccccagcctctcggacagccaccagcagcccccacaagtttgggatctactacaatggctacaggcagtggcgcaccaatggcagacaataacgagggtgccgatggagtgggtaattcctcaggaaattggcattgcgattcccaatggctgggcgacagagtcatcaccaccagcacccgaacctgggccctgcccacctacaacaaccacctctacaagcaaatctccagccaatcaggagcatcgaacgacaaccactactttggccacagcaccccttgggggtattttgacttcaacagattccactgtcacttctccccacgtgactggcaaagactcatcaacaacaactggggattccgacccaagagactcaacttcaagctctttaacattcaagtcaaagaggtcacgcagaatgacggtacgacgacgattgccaataaccttaccagcacggttcaggtgtttactgactcggagtaccagctcccgtacgtcctcggctcggcgcatcaaggatgcctcccgccgttcccagcagacgtcttcatggtcccacagtatggatacctcaccctgaacaacgggagtcaggcggtaggacgctcttccttttactgcctggagtactttccttctcagatgcttcgtaccggaaacaactttaccttcagctacacctttgaagacgtgcctttccacagtagctacgctcacagccagagtctggatcggctgatgaatcctcttatcgaccagtacctgtattatctaaacaaaacacaatcaaatagtggaactcttcagcagtctcggctactgtttagtcaagctggacccaccagcatgtctcttcaagctaaaaactggctgcctggaccttgctacagacaacagcgtctgtcaaagcaggcaaacgacaacaacaacagcaactttccctggactgcggctacaaagtatcatctaaatggccgggactcgttggttaatccaggaccagctatggccagccacaaagacgatgaagaaaagtttttccccatgcatggaaccctgatatttggtaaacaaggaacaaatgctaacgacgcggatttggacaatgtcatgattacagatgaagaagaaatccgcaccaccaatcccgtggctacggagcagtacgggactgtgtcaaataatttgcaaaactcaaatactggtccaactactggaactgccaatcaccaaggagcgttacctggtatggtgtggcaggatcgagacgtgtacctgcagggacccatttgggccaagattcctcacaccgatggacactttcatccttctccactgatgggaggttttggactcaaacacccgcctcctcagatcatgatcaaaaacactcccgttccagccaatcctcctacaaacttcagttctgccaagtttgcttccttcatcacacagtattccacgggacaagtcagcgtggagattgagtgggagctgcagaaggagaacagcaaacgctggaaccccgagatccagtacacttccaactacaacaaatctgttaatgtggactttactgtggacactaatggcgtgtattcagagcctcgccccattggcaccagatacctgactcgtaatctgtaa

SEQ ID NO: 4514 - DNA, 2208 bp, Artificial Sequence
  source: /note="Description of Artificial Sequence: Synthetic polynucleotide"
atggctgccgatggttatcttccagattggctcgaggacactctctctgaaggaataagacagtggtggaagctcaaacctggcccaccaccgccaaagcccgcagagcggcacaaggacgacagtaggggtcttgtgcttcctgggtacaagtacctcggacccttcaacggactcgacaaaggagagccggtcaacgaggcagacgccgcggccctcgagcacgacaaggcctacgaccggcagctcgacagcggagacaacccgtacctcaagtacaaccacgccgacgcggagtttcaggagcgtcttaaagaagatacgtcttttgggggcaacctcggacgagcagtattccaggcgaaaaagagggttcttgaacctctgggcctggttgaggagcctgttaagacggctccgggaaaaaagaggccggtagagcactctcctgtggagccagactcctcctcgggaaccggaaaagcgggccagcagcctgcaagaaaaagattgaattttggtcagactggagacgcaggctccgtacctgacccccagcctctcggacagccaccagcagcccccacaagtttgggatctactacaatggctacaggcagtggcgcaccaatggcagacaataacgagggtgccgatggagtgggtaattcctcaggaaattggcattgcgattcccaatggctgggcgacagagtcatcaccaccagcacccgaacctgggccctgcccacctacaacaaccacctctacaagcaaatctccagccaatcaggagcatcgaacgacaaccactactttggccacagcaccccttgggggtattttgacttcaacagattccactgtcacttctccccacgtgactggcaaagactcatcaacaacaactggggattccgacccaagagactcaacttcaagctctttaacattcaagtcaaagaggtcacgcagaatgacggtacgacgacgattgccaataaccttaccagcacggttcaggtgtttactgactcggagtaccagctcccgtacgtcctcggctcggcgcatcaaggatgcctcccgccgttcccagcagacgtcttcatggtcccacagtatggatacctcaccctgaacaacgggagtcaggcggtaggacgctcttccttttactgcctggagtactttccttctcagatgcttcgtaccggaaacaactttaccttcagctacacctttgaagacgtgcctttccacagtagctacgctcacagccagagtctggatcggctgatgaatcctcttatcgaccagtacctgtattatctaaacaaaacacaatcaaatagtggaactcttcagcagtctcggctactgtttagtcaagctggacccaccagcatgtctcttcaagctaaaaactggctgcctggaccttgctacagacaacagcgtctgtcaaagcaggcaaacgacaacaacaacagcaactttccctggactgcggctacaaagtatcatctaaatggccgggactcgttggttaatccaggaccagctatggccagccacaaagacgatgaagaaaagtttttccccatgcatggaaccctgatatttggtaaacaaggaacaaatgctaacgacgcggatttggacaatgtcatgattacagatgaagaagaaatccgcaccaccaatcccgtggctacggagcagtacgggactgtgtcaaataatttgcaaaactcaaatactggtccaactactggaactgtcaatcaccaaggagcgttacctggtatggtgtggcaggatcgagacgtgtacctgcagggacccatttgggccaagattcctcacaccgatggacactttcatccttctccactgatgggaggttttggactcaaacacccgcctcctcagatcatgatcaaaaacactcccgttccagccaatcctcctacaaacttcagttctgccaagtttgcttccttcatcacacagtattccacgggacaagtcagcgtggagattgagtgggagctgcagaaggagaacagcaaacgctggaaccccgagatccagtacacttccaactacaacaaatctgttaatgtggactttactgtggacactaatggcgtgtattcagagcctcgccccattggcaccagatacctgactcgtaatctgtaa

SEQ ID NO: 4515 - DNA, 2208 bp, Artificial Sequence
  source: /note="Description of Artificial Sequence: Synthetic polynucleotide"
atggctgccgatggttatcttccagattggctcgaggacactctctctgaaggaataagacagtggtggaagctcaaacctggcccaccaccgccaaagcccgcagagcggcacaaggacgacagtaggggtcttgtgcttcctgggtacaagtacctcggacccttcaacggactcgacaaaggagagccggtcaacgaggcagacgccgcggccctcgagcacgacaaggcctacgaccggcagctcgacagcggagacaacccgtacctcaagtacaaccacgccgacgcggagtttcaggagcgtcttaaagaagatacgtcttttgggggcaacctcggacgagcagtattccaggcgaaaaagagggttcttgaacctctgggcctggttgaggagcctgttaagacggctccgggaaaaaagaggccggtagagcactctcctgtggagccagactcctcctcgggaaccggaaaagcgggccagcagcctgcaagaaaaagattgaattttggtcagactggagacgcagactccgtacctgacccccagcctctcggacagccaccagcagcccccacaagtttgggatctactacaatggctacaggcagtggcgcaccaatggcagacaataacgagggtgccgatggagtgggtaattcctcaggaaattggcattgcgattcccaatggctggacgacagagtcatcaccaccagcacccgaacctgggccctgcccacctacaacaaccacctctacaagcaaatctccagccaatcaggagcatcgaacgacaaccactactttggccacagcaccccttgggggtattttgacttcaacagattccactgtcacttctccccacgtgactggcaaagactcatcaacaacaactggggattccgacccaagagactcaacttcaagctctttaacattcaagtcaaagaggtcacgcagaatgacggtacgacgacgattgccaataaccttaccagcacggttcaggtgtttactgactcggagtaccagctcccgtacgtcctcggctcggcgcatcaaggatgcctcccgccgttcccagcagacgtcttcatggtcccacagtatggatacctcaccctgaacaacgggagtcaggcggtaggacgctcttccttttactgcctggagtactttccttctcagatgcttcgtaccggaaacaactttaccttcagctacacctttgaagacgtgcctttccacagtagctacgctcacagccagagtctggatcggctgatgaatcctcttatcgaccagtacctgtattatctaaacaaaacacaatcaaatagtggaactcttcagcagtctcggctactgtttagtcaagctggacccaccagcatgtctcttcaagctaaaaactggctgcctggaccttgctacagacaacagcgtctgtcaaagcaggcaaacgacaacaacaacagcaactttccctggactgcggctacaaagtatcatctaaatggccgggactcgttggttaatccaggaccagctatggccagccacaaagacgatgaagaaaagtttttccccatgcatggaaccctgatatttggtaaacaaggaacaaatgctaacgacgcggatttggacaatgtcatgattacagatgaagaagaaatccgcaccaccaatcccgtggctacggagcagtacgggactgtgtcaaataatttgcaaaactcaaatactggtccaactactggaactgtcaatcaccaaggagcgttacctggtatggtgtggcaggatcgagacgtgtacctgcagggacccatttgggccaagattcctcacaccgatggacactttcatccttctccactgatgggaggttttggactcaaacacccgcctcctcagatcatgatcaaaaacactcccgttccagccaatcctcctacaaacttcagttctgccaagtttgcttccttcatcacacagtattccacgggacaagtcagcgtggagattgagtgggagctgcagaaggagaacagcaaacgctggaaccccgagatccagtacacttccaactacaacaaatctgttaatgtggactttactgtggacactaatggcgtgtattcagagcctcgccccattggcaccagatacctgactcgtaatctgtaa

SEQ ID NO: 4516 - DNA, 2208 bp, Artificial Sequence
  source: /note="Description of Artificial Sequence: Synthetic polynucleotide"
atggctgccgatggttatcttccagattggctcgaggacactctctctgaaggaataagacagtggtggaagctcaaacctggcccaccaccgccaaagcccgcagagcggcacaaggacgacagtaggggtcttgtgcttcctgggtacaagtacctcggacccttcaacggactcgacaaaggagagccggtcaacgaggcagacgccgcggccctcgagcacgacaaggcctacgaccggcagctcgacagcggagacaacccgtacctcaagtacaaccacgccgacgcggagtttcaggagcgtcttaaagaagatacgtcttttgggggcaacctcggacgagcagtattccaggcgaaaaagagggttcttgaacctctgggcctggttgaggagcctgttaagacggctccgggaaaaaagaggccggtagagcactctcctgtggagccaggctcctcctcgggaaccggaaaagcgggccagcagcctgcaagaaaaagattgaattttggtcagactggagacgcagactccgtacctgacccccagcctctcggacagccaccagcagcccccacaagtttgggatctactacaatggctacaggcagtggcgcaccaatggcagacaataacgagggtgccgatggagtgggtaattcctcaggaaattggcattgcgattcccaatggctgggcgacagagtcatcaccaccagcacccgaacctgggccctgcccacctacaacaaccacctctacaagcaaatctccagccaatcaggagcatcgaacgacaaccactactttggccacagcaccccttgggggtattttgacttcaacagattccactgtcacttctccccacgtgactggcaaagactcatcaacaacaactggggattccgacccaagagactcaacttcaagctctttaacattcaagtcaaagaggtcacgcagaatgacggtacgacgacgattgccaataaccttaccagcacggttcaggtgtttactgactcggagtaccagctcccgtacgtcctcggctcggcgcatcaaggatgcctcccgccgttcccagcagacgtcttcatggtcccacagtatggatacctcaccctgaacaacgggagtcaggcggtaggacgctcttccttttactgcctggagtactttccttctcagatgcttcgtaccggaaacaactttaccttcagctacacctttgaagacgtgcctttccacagtagctacgctcacagccagagtctggatcggctgatgaatcctcttatcgaccagtacctgtattatctaaacaaaacacaatcaaatagtggaactcttcagcagtctcggctactgtttagtcaagctggacccaccagcatgtctcttcaagctaaaaactggctgcctggaccttgctacagacaacagcgtctgtcaaagcaggcaaacgacaacaacaacagcaactttccctggactgcggctacaaagtatcatctaaatggccgggactcgttggttaatccaggaccagctatggccagccacaaagacgatgaagaaaagtttttccccatgcatggaaccctgatatttggtaaacaaggaacaaatgctaacgacgcggatttggacaatgtcatgattacagatgaagaagaaatccgcaccaccaatcccgtggctacggagcagtacgggactgtgtcaaataatttgcaaaactcaaatactggtccaactactggaactgtcaatcaccaaggagcgttacctggtatggtgtggcaggatcgagacgtgtacctgcagggacccatttgggccaagattcctcacaccgatggacactttcatccttctccactgatgggaggttttggactcaaacacccgcctcctcagatcatgatcaaaaacactcccgttccagccaatcctcctacaaacttcagttctgccaagtttgcttccttcatcacacagtattccacgggacaagtcagcgtggagattgagtgggagctgcagaaggagaacagcaaacgctggaaccccgagatccagtacacttccaactacaacaaatctgttaatgtggactttactgtggacactaatggcgtgtattcagagcctcgccccattggcaccagatacctgactcgtaatctgtaa

SEQ ID NO: 4517 - DNA, 2208 bp, Artificial Sequence
  source: /note="Description of Artificial Sequence: Synthetic polynucleotide"
atggctgccgatggttatcttccagattggctcgaggacactctctctgaaggaataagacagtggtggaagctcaaacctggcccaccaccgccaaagcccgcagagcggcacaaggacgacagtaggggtcttgtgcttcctgggtacaagtacctcggacccttcaacggactcgacaaaggagagccggtcaacgaggcagacgccgcggccctcgagcacgacaaggcctacgaccggcagctcgacagcggagacaacccgtacctcaagtacaaccacgccgacgcggagtttcaggagcgtcttaaagaagatacgtcttttgggggcaacctcggacgagcagtattccaggcgaaaaagagggttcttgaacctctgggcctggttgaggagcctgttaagacggctccgggaaaaaagaggccggtagagcactctcctgtggagccagactcctcctcgggaaccggaaaagcgggccagcagcctgcaagaaaaagattgaattttggtcagactggagacgcagactccgtacctgacccccagcctctcggacagccaccagcagcccccacaagtttgggatctactacaatggctacaggcagtggcgcaccaatggcagacaataacgagggtgccgatggagtgggtaattcctcaggaaattggcattgcgattcccaatggctgggcgacagagtcatcaccaccagcacccgaacctgggccctgcccacctacaacaaccacctctacaagcaaatctccagccaatcaggagcatcgaacgacaaccactactttggccacagcaccccttgggggtattttgacttcaacagattccactgtcacttctccccacgtgactggcaaagactcatcaacaacaactggggattccgacccaagagactcaacttcaagctctttaacattcaagtcaaagaggtcacgcagaatgacggtacgacgacgattgccaataaccttaccagcacggttcaggtgtttactgactcggagtaccagctcccgtacgtcctcggctcggcgcatcaaggatgcctcccgccgttcccagcagacgtcttcatggtcccacagtatggatacctcaccctgaacaacgggagtcaggcggtaggacgctcttccttttactgcctggagtactttccttctcagatgcttcgtaccggaaacaactttaccttcagctacacctttgaagacgtgcctttccacagtagctacgctcacagccagagtctggatcggctgatgaatcctcttatcgaccagtacctgtattatctaaacaaaacacaatcaaatagtggaactcttcagcagtctcggctactgtttagtcaagctggacccaccagcatgtctcttcaagctaaaaactggctgcctggaccttgctacagacaacagcgtctgtcaaagcaggcaaacgacaacaacaacagcaactttccctggactgcggctacaaagtatcatctaaatggccgggactcgttggttaatccaggaccagctatggccagccacaaagacgatgaagaaaagtttttccccatgcatggaaccctgatatttggtaaacaaggaacaaatgctaacgacgcggatttggacaatgtcatgattacagatgaagaagaaatccgcaccaccaatcccgtggctacggagcagtacgggactgtgtcaaataatttgcaaaactcaaatactggtccaactactggaactgtcaatcaccaaggagcgttacctggtatggtgtggcaggatcgagacgtgtacctgcagggacccatttgggccaagattcctcacaccgatggacactttcatccttctccactgatgggaggttttggactcaaacacccgcctcctcagatcatgatcaaaaacactcccgttccagccaatcctcctacaaacttcagttctgccaagtttgcttccttcatcacacagtattccacgggacaagtcagcgtggagattgggtgggagctgcagaaggagaacagcaaacgctggaaccccgagatccagtacacttccaactacaacaaatctgttaatgtggactttactgtggacactaatggcgtgtattcagagcctcgccccattggcaccagatacctgactcgtaatctgtaa

SEQ ID NO: 4518 - DNA, 2208 bp, Artificial Sequence
  source: /note="Description of Artificial Sequence: Synthetic polynucleotide"
atggctgccgatggttatcttccagattggctcgaggacactctctctgaaggaataagacagtggtggaagctcaaacctggcccaccaccgccaaagcccgcagagcggcacaaggacgacagtaggggtcttgtgcttcctgggtacaagtacctcggacccttcaacggactcgacaaaggagagccggtcaacgaggcagacgccgcggccctcgagcacgacaaggcctacgaccggcagctcgacagcggagacaacccgtacctcaagtacaaccacgccgacgcggagtttcaggagcgtcttaaagaagatacgtcttttgggggcaacctcggacgagcagtattccaggcgaaaaagagggttcttgaacctctgggcctggttgaggagcctgttaagacggctccgggaaaaaagaggccggtagagcactctcctgtggagccagactcctcctcgggaaccggaaaagcgggccagcagcctgcaagaaaaagattgaattttggtcagactggagacgcagactccgtacctgacccccagcctctcggacagccaccagcagcccccacaagtttgggatctactacaatggctacaggcagtggcgcaccaatggcagacaataacgagggtgccgatggagtgggtaattcctcaggaaattggcattgcgattcccaatggctgggcgacagagtcatcaccaccagcacccgaacctgggccctgcccacctacaacaaccacctctacaagcaaatctccagccaatcaggagcatcgaacgacaaccactactttggccacagcaccccttgggggtattttgacttcaacagattccactgtcacttctccccacgtgactggcaaagactcatcaacaacaactggggattccgacccaagagactcaacttcaagctctttaacattcaagtcaaagaggtcacgcagaatgacggtacgacgacgattgccaataaccttaccagcacggttcaggtgtttactgactcggagtaccagctcccgtacgtcctcggctcggcgcatcaaggatgcctcccgccgttcccagcagacgtcttcatggtcccacagtatggatacctcaccctgaacaacgggagtcaggcggtaggacgctcttccttttactgcctggagtactttccttctcagatgcttcgtaccggaaacaactttaccttcagctacacctttgaagacgtgcctttccacagtagctacgctcacagccagagtctggatcggctgatgaatcctcttatcgaccggtacctgtattatctaaacaaaacacaatcaaatagtggaactcttcagcagtctcggctactgtttagtcaagctggacccaccagcatgtctcttcaagctaaaaactggctgcctggaccttgctacagacaacagcgtctgtcaaagcaggcaaacgacaacaacaacagcaactttccctggactgcggctacaaagtatcatctaaatggccgggactcgttggttaatccaggaccagctatggccagccacaaagacgatgaagaaaagtttttccccatgcatggaaccctgatatttggtaaacaaggaacaaatgctaacgacgcggatttggacaatgtcatgattacagatgaagaagaaatccgcaccaccaatcccgtggctacggagcagtacgggactgtgtcaaataatttgcaaaactcaaatactggtccaactactggaactgtcaatcaccaaggagcgttacctggtatggtgtggcaggatcgagacgtgtacctgcagggacccatttgggccaagattcctcacaccgatggacactttcatccttctccactgatgggaggttttggactcaaacacccgcctcctcagatcatgatcaaaaacactcccgttccagccaatcctcctacaaacttcagttctgccaagtttgcttccttcatcacacagtattccacgggacaagtcagcgtggagattgagtgggagctgcagaaggagaacagcaaacgctggaaccccgagatccagtacacttccaactacaacaaatctgttaatgtggactttactgtggacactaatggcgtgtattcagagcctcgccccattggcaccagatacctgactcgtaatctgtaa

SEQ ID NO: 4519 - DNA, 2208 bp, Artificial Sequence
  source: /note="Description of Artificial Sequence: Synthetic polynucleotide"
atggctgccgatggttatcttccagattggctcgaggacactctctctgaaggaataagacagtggtggaagctcaaacctggcccaccaccgccaaagcccgcagagcggcacaaggacgacagtaggggtcttgtgcttcctgggtacaagtacctcggacccttcaacggactcgacaaaggagagccggtcaacgaggcagacgccgcggccctcgagcacgacaaggcctacgaccggcagctcgacagcggagacaacccgtacctcaagtacaaccacgccgacgcggagtttcaggagcgtcttaaagaagatacgtcttttgggggcaacctcggacgagcagtattccaggcgaaaaagagggttcttgaacctctgggcctggttgaggagcctgttaagacggctccgggaaaaaagaggccggtagagcactctcctgtggagccagactcctcctcgggaaccggaaaagcgggccagcagcctgcaagaaaaagattgaattttggtcagactggagacgcagactccgtacctgacccccagcctctcggacagccaccagcagcccccacaagtttgggatctactacaatggctacaggcagtggcgcaccaatggcagacaataacgagggtgccgatggagtgggtaattcctcaggaaattggcattgcgattcccaatggctgggcgacagagtcatcaccaccagcacccgaacctgggccctgcccacctacaacaaccacctctacaagcaaatctccagccaatcaggagcatcgaacgacaaccactactttggccacagcaccccttgggggtattttgacttcaacagattccactgtcacttctccccacgtgactggcaaagactcatcaacaacaactggggattccgacccaagagactcaacttcaagctctttaacattcaagtcaaagaggtcacgcagaatgacggtacgacgacgattgccaataaccttaccagcacggttcaggtgtttactgactcggagtaccagctcccgtacgtcctcggctcggcgcatcaaggatgcctcccgccgttcccagcagacgtcttcatggtcccacagtatggatacctcaccctgaacaacgggagtcaggcggtaggacgctcttccttttactgcctggagtactttccttctcagatgcttcgtaccggaaacaactttaccttcagctacacctttgaagacgtgcctttccacagtagctacgctcacagccagagtctggatcggctgatgaatcctcttatcgaccagcacctgtattatctaaacaaaacacaatcaaatagtggaactcttcagcagtctcggctactgtttagtcaagctggacccaccagcatgtctcttcaagctaaaaactggctgcctggaccttgctacagacaacagcgtctgtcaaagcaggcaaacgacaacaacaacagcaactttccctggactgcggctacaaagtatcatctaaatggccgggactcgttggttaatccaggaccagctatggccagccacaaagacgatgaagaaaagtttttccccatgcatggaaccctgatatttggtaaacaaggaacaaatgctaacgacgcggatttggacaatgtcatgattacagatgaagaagaaatccgcaccaccaatcccgtggctacggagcagtacgggactgtgtcaaataatttgcaaaactcaaatactggtccaactactggaactgtcaatcaccaaggagcgttacctggtatggtgtggcaggatcgagacgtgtacctgcagggacccatttgggccaagattcctcacaccgatggacactttcatccttctccactgatgggaggttttggactcaaacacccgcctcctcagatcatgatcaaaaacactcccgttccagccaatcctcctacaaacttcagttctgccaagtttgcttccttcatcacacagtattccacgggacaagtcagcgtggagattgagtgggagctgcagaaggagaacagcaaacgctggaaccccgagatccagtacacttccaactacaacaaatctgttaatgtggactttactgtggacactaatggcgtgtattcagagcctcgccccattggcaccagatacctgactcgtaatctgtaa

SEQ ID NO: 4520 - DNA, 2208 bp, Artificial Sequence
  source: /note="Description of Artificial Sequence: Synthetic polynucleotide"
atggctgccgatggttatcttccagattggctcgaggacactctctctgaaggaataagacagtggtggaagctcaaacctggcccaccaccgccaaagcccgcagagcggcacaaggacgacagtaggggtcctgtgcttcctgggtacaagtacctcggacccttcaacggactcgacaaaggagagccggtcaacgaggcagacgccgcggccctcgagcacgacaaggcctacgaccggcagctcgacagcggagacaacccgtacctcaagtacaaccacgccgacgcggagtttcaggagcgtcttaaagaagatacgtcttttgggggcaacctcggacgagcagtattccaggcgaaaaagagggttcttgaacctctgggcctggttgaggagcctgttaagacggctccgggaaaaaagaggccggtagagcactctcctgtggagccagactcctcctcgggaaccggaaaagcgggccagcagcctgcaagaaaaagattgaattttggtcagactggagacgcagactccgtacctgacccccagcctctcggacagccaccagcagcccccacaagtttgggatctactacaatggctacaggcagtggcgcaccaatggcagacaataacgagggtgccgatggagtgggtaattcctcaggaaattggcattgcgattcccaatggctgggcgacagagtcatcaccaccagcacccgaacctgggccctgcccacctacaacaaccacctctacaagcaaatctccagccaatcaggagcatcgaacgacaaccactactttggccacagcaccccttgggggtattttgacttcaacagattccactgtcacttctccccacgtgactggcaaagactcatcaacaacaactggggattccgacccaagagactcaacttcaagctctttaacattcaagtcaaagaggtcacgcagaatgacggtacgacgacgattgccaataaccttaccagcacggttcaggtgtttactgactcggagtaccagctcccgtacgtcctcggctcggcgcatcaaggatgcctcccgccgttcccagcagacgtcttcatggtcccacagtatggatacctcaccctgaacaacgggagtcaggcggtaggacgctcttccttttactgcctggagtactttccttctcagatgcttcgtaccggaaacaactttaccttcagctacacctttgaagacgtgcctttccacagtagctacgctcacagccagagtctggatcggctgatgaatcctcttatcgaccagtacctgtattatctaaacaaaacacaatcaaatagtggaactcttcagcagtctcggctactgtttagtcaagctggacccaccagcatgtctcttcaagctaaaaactggctgcctggaccttgctacagacaacagcgtctgtcaaagcaggcaaacgacaacaacaacagcaactttccctggactgcggctacaaagtatcatctaaatggccgggactcgttggttaatccaggaccagctatggccagccacaaagacgatgaagaaaagtttttccccatgcatggaaccctgatatttggtaaacaaggaacaaatgctaacgacgcggatttggacaatgtcatgattacagatgaagaagaaatccgcaccaccaatcccgtggctacggagcagtacgggactgtgtcaaataatttgcaaaactcaaatactggtccaactactggaactgtcaatcaccaaggagcgttacctggtatggtgtggcaggatcgagacgtgtacctgcagggacccatttgggccaagattcctcacaccgatggacactttcatccttctccactgatgggaggttttggactcaaacacccgcctcctcagatcatgatcaaaaacactcccgttccagccaatcctcctacaaacttcagttctgccaagtttgcttccttcatcacacagtattccacgggacaagtcagcgtggagattgagtgggagctgcagaaggagaacagcaaacgctggaaccccgagatccagtacacttccaactacaacaaatctgttaatgtggactttactgtggacactaatggcgtgtattcagagcctcgccccattggcaccagatacctgactcgtaatctgtaa

SEQ ID NO: 4521 - DNA, 2208 bp, Artificial Sequence
  source: /note="Description of Artificial Sequence: Synthetic polynucleotide"
atggctgccgatggttatcttccagattggctcgaggacactctctctgaaggaataagacagtggtggaagctcaaacctggcccaccaccgccaaagcccgcagagcggcacaaggacgacagtaggggtcttgtgcttcctgggtacaagtacctcggacccttcaacggactcgacaaaggagagccggtcaacgaggcaggcgccgcggccctcgagcacgacaaggcctacgaccggcagctcgacagcggagacaacccgtacctcaagtacaaccacgccgacgcggagtttcaggagcgtcttaaagaagatacgtcttttgggggcaacctcggacgagcagtattccaggcgaaaaagagggttcttgaacctctgggcctggttgaggagcctgttaagacggctccgggaaaaaagaggccggtagagcactctcctgtggagccagactcctcctcgggaaccggaaaagcgggccagcagcctgcaagaaaaagattgaattttggtcagactggagacgcagactccgtacctgacccccagcctctcggacagccaccagcagcccccacaagtttgggatctactacaatggctacaggcagtggcgcaccaatggcagacaataacgagggtgccgatggagtgggtaattcctcaggaaattggcattgcgattcccaatggctgggcgacagagtcatcaccaccagcacccgaacctgggccctgcccacctacaacaaccacctctacaagcaaatctccagccaatcaggagcatcgaacgacaaccactactttggccacagcaccccttgggggtattttgacttcaacagattccactgtcacttctccccacgtgactggcaaagactcatcaacaacaactggggattccgacccaagagactcaacttcaagctctttaacattcaagtcaaagaggtcacgcagaatgacggtacgacgacgattgccaataaccttaccagcacggttcaggtgtttactgactcggagtaccagctcccgtacgtcctcggctcggcgcatcaaggatgcctcccgccgttcccagcagacgtcttcatggtcccacagtatggatacctcaccctgaacaacgggagtcaggcggtaggacgctcttccttttactgcctggagtactttccttctcagatgcttcgtaccggaaacaactttaccttcagctacacctttgaagacgtgcctttccacagtagctacgctcacagccagagtctggatcggctgatgaatcctcttatcgaccagtacctgtattatctaaacaaaacacaatcaaatagtggaactcttcagcagtctcggctactgtttagtcaagctggacccaccagcatgtctcttcaagctaaaaactggctgcctggaccttgctacagacaacagcgtctgtcaaagcaggcaaacgacaacaacaacagcaactttccctggactgcggctacaaagtatcatctaaatggccgggactcgttggttaatccaggaccagctatggccagccacaaagacgatgaagaaaagtttttccccatgcatggaaccctgatatttggtaaacaaggaacaaatgctaacgacgcggatttggacaatgtcatgattacagatgaagaagaaatccgcaccaccaatcccgtggctacggagcagtacgggactgtgtcaaataatttgcaaaactcaaatactggtccaactactggaactgtcaatcaccaaggagcgttacctggtatggtgtggcaggatcgagacgtgtacctgcagggacccatttgggccaagattcctcacaccgatggacactttcatccttctccactgatgggaggttttggactcaaacacccgcctcctcagatcatgatcaaaaacactcccgttccagccaatcctcctacaaacttcagttctgccaagtttgcttccttcatcacacagtattccacgggacaagtcagcgtggagattgagtgggagctgcagaaggagaacagcaaacgctggaaccccgagatccagtacacttccaactacaacaaatctgttaatgtggactttactgtggacactaatggcgtgtattcagagcctcgccccattggcaccagatacctgactcgtaatctgtaa

SEQ ID NO: 4522 - DNA, 2208 bp, Artificial Sequence
  source: /note="Description of Artificial Sequence: Synthetic polynucleotide"
atggctgccgatggttatcttccagattggctcgaggacactctctctgaaggaataagacagtggtggaagctcaaacctggcccaccaccgccaaagcccgcagagcggcacaaggacgacagtaggggtcttgtgcttcctgggtacaagtacctcggacccttcaacggactcgacaaaggagagccggtcaacggggcagacgccgcggccctcgagcacgacaaggcctacgaccggcagctcgacagcggagacaacccgtacctcaagtacaaccacgccgacgcggagtttcaggagcgtcttaaagaagatacgtcttttgggggcaacctcggacgagcagtattccaggcgaaaaagagggttcttgaacctctgggcctggttgaggagcctgttaagacggctccgggaaaaaagaggccggtagagcactctcctgtggagccagactcctcctcgggaaccggaaaagcgggccagcagcctgcaagaaaaagattgaattttggtcagactggagacgcagactccgtacctgacccccagcctctcggacagccaccagcagcccccacaagtttgggatctactacaatggctacaggcagtggcgcaccaatggcagacaataacgagggtgccgatggagtgggtaattcctcaggaaattggcattgcgattcccaatggctgggcgacagagtcatcaccaccagcacccgaacctgggccctgcccacctacaacaaccacctctacaagcaaatctccagccaatcaggagcatcgaacgacaaccactactttggccacagcaccccttgggggtattttgacttcaacagattccactgtcacttctccccacgtgactggcaaagactcatcaacaacaactggggattccgacccaagagactcaacttcaagctctttaacattcaagtcaaagaggtcacgcagaatgacggtacgacgacgattgccaataaccttaccagcacggttcaggtgtttactgactcggagtaccagctcccgtacgtcctcggctcggcgcatcaaggatgcctcccgccgttcccagcagacgtcttcatggtcccacagtatggatacctcaccctgaacaacgggagtcaggcggtaggacgctcttccttttactgcctggagtactttccttctcagatgcttcgtaccggaaacaactttaccttcagctacacctttgaagacgtgcctttccacagtagctacgctcacagccagagtctggatcggctgatgaatcctcttatcgaccagtacctgtattatctaaacaaaacacaatcaaatagtggaactcttcagcagtctcggctactgtttagtcaagctggacccaccagcatgtctcttcaagctaaaaactggctgcctggaccttgctacagacaacagcgtctgtcaaagcaggcaaacgacaacaacaacagcaactttccctggactgcggctacaaagtatcatctaaatggccgggactcgttggttaatccaggaccagctatggccagccacaaagacgatgaagaaaagtttttccccatgcatggaaccctgatatttggtaaacaaggaacaaatgctaacgacgcggatttggacaatgtcatgattacagatgaagaagaaatccgcaccaccaatcccgtggctacggagcagtacgggactgtgtcaaataatttgcaaaactcaaatactggtccaactactggaactgtcaatcaccaaggagcgttacctggtatggtgtggcaggatcgagacgtgtacctgcagggacccatttgggccaagattcctcacaccgatggacactttcatccttctccactgatgggaggttttggactcaaacacccgcctcctcagatcatgatcaaaaacactcccgttccagccaatcctcctacaaacttcagttctgccaagtttgcttccttcatcacacagtattccacgggacaagtcagcgtggagattgagtgggagctgcagaaggagaacagcaaacgctggaaccccgagatccagtacacttccaactacaacaaatctgttaatgtggactttactgtggacactaatggcgtgtattcagagcctcgccccattggcaccagatacctgactcgtaatctgtaa

SEQ ID NO: 4523 - DNA, 2208 bp, Artificial Sequence
  source: /note="Description of Artificial Sequence: Synthetic polynucleotide"
atggctgccgatggttatcttccagattggctcgaggacactctctctgaaggaataagacagtggtggaagctcaaacctggcccaccaccgccaaagcccgcagagcggcacaaggacgacagtaggggtcttgtgcttcctgggtacaagtacctcggacccttcaacggactcgacaaaggagagccggtcaacgaggcagacgccgcggccctcgagcacgacaaggcctacgaccggcagctcgacagcggagacaacccgtacctcaagtacaaccacgccgacgcggagtttcaggagcgtcttaaagaagatacgtcttttgggggcaacctcggacgagcagtattccaggcgaaaaagagggttcttgaacctctgggcctggttgaggagcctgttaagacggctccgggaaaaaagaggccggtagagcactctcctgtggagccagactcctcctcgggaaccggaaaagcgggccagcagcctgcaagaaaaagattgaattttggtcagactggagacgcagactccgtacctgacccccagcctctcggacagccaccagcagcccccacaagtttgggatctactacaatggctacaggcagtggcgcaccaatggcagacaataacgagggtgccgatggagtgggtaattcctcaggaaattggcattgcgattcccaatggctgggcgacagagtcatcaccaccagcacccgaacctgggccctgcccacctacaacaaccacctctacaagcaaatctccagccaatcaggagcatcgaacgacaaccactactttggccacagcaccccttgggggtattttgacttcaacagattccactgtcacttctccccacgtgactggcaaagactcatcaacaacaactggggattccgacccaagagactcaacttcaagctctttaacattcaagtcaaagaggtcacgcagaatgacggtacgacgacgattgccaataaccttaccagcacggttcaggtgtttactgactcggagtaccagctcccgtacgtcctcggctcggcgcatcaaggatgcctcccgccgttcccagcagacgtcttcatggtcccacagtatggatacctcaccctgaacaacgggagtcaggcggtaggacgctcttccctttactgcctggagtactttccttctcagatgcttcgtaccggaaacaactttaccttcagctacacctttgaagacgtgcctttccacagtagctacgctcacagccagagtctggatcggctgatgaatcctcttatcgaccagtacctgtattatctaaacaaaacacaatcaaatagtggaactcttcagcagtctcggctactgtttagtcaagctggacccaccagcatgtctcttcaagctaaaaactggctgcctggaccttgctacagacaacagcgtctgtcaaagcaggcaaacgacaacaacaacagcaactttccctggactgcggctacaaagtatcatctaaatggccgggactcgttggttaatccaggaccagctatggccagccacaaagacgatgaagaaaagtttttccccatgcatggaaccctgatatttggtaaacaaggaacaaatgctaacgacgcggatttggacaatgtcatgattacagatgaagaagaaatccgcaccaccaatcccgtggctacggagcagtacgggactgtgtcaaataatttgcaaaactcaaatactggtccaactactggaactgtcaatcaccaaggagcgttacctggtatggtgtggcaggatcgagacgtgtacctgcagggacccatttgggccaagattcctcacaccgatggacactttcatccttctccactgatgggaggttttggactcaaacacccgcctcctcagatcatgatcaaaaacactcccgttccagccaatcctcctacaaacttcagttctgccaagtttgcttccttcatcacacagtattccacgggacaagtcagcgtggagattgagtgggagctgcagaaggagaacagcaaacgctggaaccccgagatccagtacacttccaactacaacaaatctgttaatgtggactttactgtggacactaatggcgtgtattcagagcctcgccccattggcaccagatacctgactcgtaatctgtaa

SEQ ID NO: 4524 - DNA, 2208 bp, Artificial Sequence
  source: /note="Description of Artificial Sequence: Synthetic polynucleotide"
atggctgccgatggttatcttccagattggctcgaggacactctctctgaaggaataagacagtggtggaagctcaaacctggcccaccaccgccaaagcccgcagagcggcacaaggacgacagtaggggtcttgtgcttcctgggtacaagtacctcggacccttcaacggactcgacaaaggagagccggtcaacgaggcagacgccgcggccctcgagcacgacaaggcctacgaccggcagctcgacagcggagacaacccgtacctcaagtacaaccacgccgacgcggagtttcaggagcgtcttaaagaagatacgtcttttgggggcaacctcggacgagcagtattccaggcgaaaaagagggttcttgaacctctgggcctggttgaggagcctgttaagacggctccgggaaaaaagaggccggtagagcactctcctgtggagccagactcctcctcgggaaccggaaaagcgggccagcagcctgcaagaaaaagattgaattttggtcagactggagacgcagactccgtacctgacccccagcctctcggacagccaccagcagcccccacaagtttgggatctactacaatggctacaggcagtggcgcaccaatggcagacaataacgagggtgccgatggagtgggtaattcctcaggaaattggcattgcgattcccaatggctgggcgacagagtcatcaccaccagcacccgaacctgggccctgcccacctacaacaaccacctctacaagcaaatctccagccaatcaggagcatcgaacgacaaccactactttggccacagcaccccttgggggtattttgacttcaacagattccactgtcacttctccccacgtgactggcaaagactcatcaacaacaactggggattccgacccaagagactcaacttcaagctctttaacattcaagtcaaagaggtcacgcagaatgacggtacgacgacgattgccaataaccttaccagcacggttcaggtgtttactgactcggagtaccagctcccgtacgtcctcggctcggcgcatcaaggatgcctcccgccgttcccagcagacgtcttcatggtcccacagtatggatacctcaccctgaacaacgggagtcaggcggtaggacgctcttccttttactgcctggagtactttccttctcagatgcttcgtaccggaaacaactttacctccagctacacctttgaagacgtgcctttccacagtagctacgctcacagccagagtctggatcggctgatgaatcctcttatcgaccagtacctgtattatctaaacaaaacacaatcaaatagtggaactcttcagcagtctcggctactgtttagtcaagctggacccaccagcatgtctcttcaagctaaaaactggctgcctggaccttgctacagacaacagcgtctgtcaaagcaggcaaacgacaacaacaacagcaactttccctggactgcggctacaaagtatcatctaaatggccgggactcgttggttaatccaggaccagctatggccagccacaaagacgatgaagaaaagtttttccccatgcatggaaccctgatatttggtaaacaaggaacaaatgctaacgacgcggatttggacaatgtcatgattacagatgaagaagaaatccgcaccaccaatcccgtggctacggagcagtacgggactgtgtcaaataatttgcaaaactcaaatactggtccaactactggaactgtcaatcaccaaggagcgttacctggtatggtgtggcaggatcgagacgtgtacctgcagggacccatttgggccaagattcctcacaccgatggacactttcatccttctccactgatgggaggttttggactcaaacacccgcctcctcagatcatgatcaaaaacactcccgttccagccaatcctcctacaaacttcagttctgccaagtttgcttccttcatcacacagtattccacgggacaagtcagcgtggagattgagtgggagctgcagaaggagaacagcaaacgctggaaccccgagatccagtacacttccaactacaacaaatctgttaatgtggactttactgtggacactaatggcgtgtattcagagcctcgccccattggcaccagatacctgactcgtaatctgtaa

SEQ ID NO: 4525 - DNA, 2208 bp, Artificial Sequence
  source: /note="Description of Artificial Sequence: Synthetic polynucleotide"
atggctgccgatggttatcttccagattggctcgaggacactctctctgaaggaataagacagtggtggaagctcaaacctggcccaccaccgccaaagcccgcagagcggcacaaggacgacagtaggggtcttgtgcttcctgggtacaagtacctcggacccttcaacggactcgacaaaggagagccggtcaacgaggcagacgccgcggccctcgagcacgacaaggcctacgaccggcagctcgacagcggagacaacccgtacctcaagtacaaccacgccgacgcggagtttcaggagcgtcttaaagaagatacgtcttttgggggcaacctcggacgagcagtattccaggcgaaaaagagggttcttgaacctctgggcctggttgaggagcctgttaagacggctccgggaaaaaagaggccggtagagcactctcctgtggagccagactcctcctcgggaaccggaaaagcgggccagcagcctgcaagaaaaagattgaattttggtcagactggagacgcagactccgtacctgacccccagcctctcggacagccaccagcagcccccacaagtttgggatctactacaatggctacaggcagtggcgcaccaatggcagacaataacgagggtgccgatggagtgggtaattcctcaggaaattggcattgcgattcccaatggctgggcgacggagtcatcaccaccagcacccgaacctgggccctgcccacctacaacaaccacctctacaagcaaatctccagccaatcaggagcatcgaacgacaaccactactttggccacagcaccccttgggggtattttgacttcaacagattccactgtcacttctccccacgtgactggcaaagactcatcaacaacaactggggattccgacccaagagactcaacttcaagctctttaacattcaagtcaaagaggtcacgcagaatgacggtacgacgacgattgccaataaccttaccagcacggttcaggtgtttactgactcggagtaccagctcccgtacgtcctcggctcggcgcatcaaggatgcctcccgccgttcccagcagacgtcttcatggtcccacagtatggatacctcaccctgaacaacgggagtcaggcggtaggacgctcttccttttactgcctggagtactttccttctcagatgcttcgtaccggaaacaactttaccttcagctacacctttgaagacgtgcctttccacagtagctacgctcacagccagagtctggatcggctgatgaatcctcttatcgaccagtacctgtattatctaaacaaaacacaatcaaatagtggaactcttcagcagtctcggctactgtttagtcaagctggacccaccagcatgtctcttcaagctaaaaactggctgcctggaccttgctacagacaacagcgtctgtcaaagcaggcaaacgacaacaacaacagcaactttccctggactgcggctacaaagtatcatctaaatggccgggactcgttggttaatccaggaccagctatggccagccacaaagacgatgaagaaaagtttttccccatgcatggaaccctgatatttggtaaacaaggaacaaatgctaacgacgcggatttggacaatgtcatgattacagatgaagaagaaatccgcaccaccaatcccgtggctacggagcagtacgggactgtgtcaaataatttgcaaaactcaaatactggtccaactactggaactgtcaatcaccaaggagcgttacctggtatggtgtggcaggatcgagacgtgtacctgcagggacccatttgggccaagattcctcacaccgatggacactttcatccttctccactgatgggaggttttggactcaaacacccgcctcctcagatcatgatcaaaaacactcccgttccagccaatcctcctacaaacttcagttctgccaagtttgcttccttcatcacacagtattccacgggacaagtcagcgtggagattgagtgggagctgcagaaggagaacagcaaacgctggaaccccgagatccagtacacttccaactacaacaaatctgttaatgtggactttactgtggacactaatggcgtgtattcagagcctcgccccattggcaccagatacctgactcgtaatctgtaa

SEQ ID NO: 4526 - DNA, 2208 bp, Artificial Sequence
  source: /note="Description of Artificial Sequence: Synthetic polynucleotide"
atggctgccgatggttatcttccagattggctcgaggacactctctctgaaggaataagacagtggtggaagctcaaacctggcccaccaccgccaaagcccgcagagcggcacaaggacgacagtaggggtcttgtgcttcctgggtacaagtacctcggacccttcaacggactcgacaaaggagagccggtcaacgaggcagacgccgcggccctcgagcacgacaaggcctacgaccggcagctcgacagcggagacaacccgtacctcaagtacaaccacgccgacgcggagtttcaggagcgtcttaaagaagatacgtcttttgggggcaacctcggacgagcagtattccaggcgaaaaagagggttcttgaacctctgggcctggttgaggagcctgttaagacggctccgggaaaaaagaggccggtagagcactctcctgtggagccagactcctcctcgggaaccggaaaagcgggccagcagcctgcaagaaaaagattgaattttggtcagactggagacgcagactccgtacctgacccccagcctctcggacagccaccagcagcccccacaagtttgggatctactacaatggctacaggcagtggcgcaccaatggcagacaataacgagggtgccgatggagtgggtaattcctcaggaaattggcattgcgattcccaatggctgggcgacagagtcatcaccaccagcacccgaacctgggccctgcccacctacaacaaccacctctacaagcaaatctccagccaatcaggagcatcgaacgacaaccactactttggccacagcaccccttgggggtattttgacttcaacagattccactgtcacttctccccacgtgactggcaaagactcatcaacaacaactggggattccgacccaagagactcaacttcaagctctttaacattcaagtcaaagaggtcacgcagaatgacggtacgacgacgattgccaataaccttaccagcacggttcaggtgtttactgactcggagtaccagctcccgtacgtcctcggctcggcgcatcaaggatgcctcccgccgttcccagcagacgtcttcatggtcccacagtatggatacctcaccctgaacaacgggagtcaggcggtaggacgctcttccttttactgcctggagtactttccttctcagatgcttcgtaccggaaacaactttaccttcagctacacctttgaagacgtgcctttccacagtagctacgctcacagccagagtctggatcggctgatgaatcctcttatcgaccagtacctgtattatctaaacaaaacacaatcaaatagtggaactcttcagcagtctcggctactgtttagtcaagctggacccaccagcatgtctcttcaagctaaaaactggctgcctggaccttgctacagacaacagcgtctgtcaaagcaggcaaacgacaacaacaacagcaactttccctggactgcggctacaaagtatcatctaaatggccgggactcgttggttaatccaggaccagctatggccagccacaaagacgatgaagaaaagtttttccccatgcatggaaccctgatatttggtaaacaaggaacaaatgctaacgacgcggatttggacaatgtcatgattacagatgaagaagaaatccgcaccaccaatcccgtggctacggagcagtacaggactgtgtcaaataatttgcaaaactcaaatactggtccaactactggaactgtcaatcaccaaggagcgttacctggtatggtgtggcaggatcgagacgtgtacctgcagggacccatttgggccaagattcctcacaccgatggacactttcatccttctccactgatgggaggttttggactcaaacacccgcctcctcagatcatgatcaaaaacactcccgttccagccaatcctcctacaaacttcagttctgccaagtttgcttccttcatcacacagtattccacgggacaagtcagcgtggagattgagtgggagctgcagaaggagaacagcaaacgctggaaccccgagatccagtacacttccaactacaacaaatctgttaatgtggactttactgtggacactaatggcgtgtattcagagcctcgccccattggcaccagatacctgactcgtaatctgtaa

SEQ ID NO: 4527 - DNA, 2208 bp, Artificial Sequence
  source: /note="Description of Artificial Sequence: Synthetic polynucleotide"
atggctgccgatggttatcttccagattggctcgaggacactctctctgaaggaataagacagtggtggaagctcaaacctggcccaccaccgccaaagcccgcagagcggcacaaggacgacagtaggggtcttgtgcttcctgggtacaagtacctcggacccttcaacggactcgacaaaggagagccggtcaacgaggcagacgccgcggccctcgagcacgacaaggcctacgaccggcagctcgacagcggagacaacccgtacctcaagtacaaccacgccgacgcggagtttcaggagcgtcttaaagaagatacgtcttttgggggcaacctcggacgagcagtattccaggcgaaaaagagggttcttgaacctctgggcctggttgaggagcctgttaagacggctccgggaaaaaagaggccggtagagcactctcctgtggagccagactcctcctcgggaaccggaaaagcgggccagcagcctgcaagaaaaagattgaattttggtcagactggagacgcagactccgtacctgacccccagcctctcggacagccaccagcagcccccacaagtttgggatctactacaatggctacaggcagtggcgcaccaatggcagacaataacgagggtgccgatggagtgggtaattcctcaggaaattggcattgcgattcccaatggctgggcgacagagtcatcaccaccagcacccgaacctgggccctgcccacctacaacaaccacctctacaagcaaatctccagccaatcaggagcatcgaacgacaaccactactttggccacagcaccccttgggggtattttgacttcaacagattccactgtcacttctccccacgtgactggcaaagactcatcaacaacaactggggattccgacccaagagactcaacttcaagctctttaacattcaagtcaaagaggtcacgcagaatgacggtacgacgacgattgccaataaccttaccagcacggttcgggtgtttactgactcggagtaccagctcccgtacgtcctcggctcggcgcatcaaggatgcctcccgccgttcccagcagacgtcttcatggtcccacagtatggatacctcaccctgaacaacgggagtcaggcggtaggacgctcttccttttactgcctggagtactttccttctcagatgcttcgtaccggaaacaactttaccttcagctacacctttgaagacgtgcctttccacagtagctacgctcacagccagagtctggatcggctgatgaatcctcttatcgaccagtacctgtattatctaaacaaaacacaatcaaatagtggaactcttcagcagtctcggctactgtttagtcaagctggacccaccagcatgtctcttcaagctaaaaactggctgcctggaccttgctacagacaacagcgtctgtcaaagcaggcaaacgacaacaacaacagcaactttccctggactgcggctacaaagtatcatctaaatggccgggactcgttggttaatccaggaccagctatggccagccacaaagacgatgaagaaaagtttttccccatgcatggaaccctgatatttggtaaacaaggaacaaatgctaacgacgcggatttggacaatgtcatgattacagatgaagaagaaatccgcaccaccaatcccgtggctacggagcagtacgggactgtgtcaaataatttgcaaaactcaaatactggtccaactactggaactgtcaatcaccaaggagcgttacctggtatggtgtggcaggatcgagacgtgtacctgcagggacccatttgggccaagattcctcacaccgatggacactttcatccttctccactgatgggaggttttggactcaaacacccgcctcctcagatcatgatcaaaaacactcccgttccagccaatcctcctacaaacttcagttctgccaagtttgcttccttcatcacacagtattccacgggacaagtcagcgtggagattgagtgggagctgcagaaggagaacagcaaacgctggaaccccgagatccagtacacttccaactacaacaaatctgttaatgtggactttactgtggacactaatggcgtgtattcagagcctcgccccattggcaccagatacctgactcgtaatctgtaa

SEQ ID NO: 4528 - DNA, 2208 bp, Artificial Sequence
  source: /note="Description of Artificial Sequence: Synthetic polynucleotide"
atggctgccgatggttatcttccagattggctcgaggacactctctctgaaggaataagacagtggtggaagctcaaacctggcccaccaccgccaaagcccgcagagcggcacaaggacgacagtaggggtcttgtgcttcctgggtacaagtacctcggacccttcaacggactcgacaaaggagagccggtcaacgaggcagacgccgcggccctcgagcacgacaaggcctacgaccggcagctcgacagcggagacaacccgtacctcaagtacaaccacgccgacgcggagtttcaggagcgtcttaaagaagatacgtcttttgggggcaacctcggacgagcagtattccaggcgaaaaagagggttcttgaacctctgggcctggttgaggagcctgttaagacggctccgggaaaaaagaggccggtagagcactctcctgtggagccagactcctcctcgggaaccggaaaagcgggccagcagcctgcaagaaaaagattgaattttggtcagactggagacgcagactccgtacctgacccccagcctctcggacagccaccagcagcccccacaagtttgggatctactacaatggctacaggcagtggcgcaccaatggcagacaataacgagggtgccgatggagtgggtaattcctcaggaaattggcattgcgattcccaatggctgggcgacagagtcatcaccaccagcacccgaacctgggccctgcccacctacaacaaccacctctacaagcaaatctccagccaatcaggagcatcgaacgacaaccactactttggccacagcaccccttgggggtattttgacttcaacagattccactgtcacttctccccacgtgactggcaaagactcatcaacaacaactggggattccgacccaagagactcaacttcaagctctttaacattcaagtcaaagaggtcacgcagaatgacggtacgacgacgattgccaataaccttaccagcacggttcaggtgtttactgactcggagtaccagctcccgtacgtcctcggctcggcgcatcaaggatgcctcccgccgttcccagcagacgtcttcatggtcccacagtatggatacctcaccctgaacaacgggagtcaggcggtaggacgctcttccttttactgcctggagtactttccttctcagatgcttcgtaccggaaacaactttaccttcagctacacctttgaagacgtgcctttccacagtagctacgctcacagccagagtctggatcggctgatgaatcctcttatcgaccagtacctgtattatctaaacaaaacacaatcaaatagtggaactcttcggcagtctcggctactgtttagtcaagctggacccaccagcatgtctcttcaagctaaaaactggctgcctggaccttgctacagacaacagcgtctgtcaaagcaggcaaacgacaacaacaacagcaactttccctggactgcggctacaaagtatcatctaaatggccgggactcgttggttaatccaggaccagctatggccagccacaaagacgatgaagaaaagtttttccccatgcatggaaccctgatatttggtaaacaaggaacaaatgctaacgacgcggatttggacaatgtcatgattacagatgaagaagaaatccgcaccaccaatcccgtggctacggagcagtacgggactgtgtcaaataatttgcaaaactcaaatactggtccaactactggaactgtcaatcaccaaggagcgttacctggtatggtgtggcaggatcgagacgtgtacctgcagggacccatttgggccaagattcctcacaccgatggacactttcatccttctccactgatgggaggttttggactcaaacacccgcctcctcagatcatgatcaaaaacactcccgttccagccaatcctcctacaaacttcagttctgccaagtttgcttccttcatcacacagtattccacgggacaagtcagcgtggagattgagtgggagctgcagaaggagaacagcaaacgctggaaccccgagatccagtacacttccaactacaacaaatctgttaatgtggactttactgtggacactaatggcgtgtattcagagcctcgccccattggcaccagatacctgactcgtaatctgtaa

SEQ ID NO: 4529 - DNA, 2208 bp, Artificial Sequence
  source: /note="Description of Artificial Sequence: Synthetic polynucleotide"
atggctgccgatggttatcttccagattggctcgaggacactctctctgaaggaataagacagtggtggaagctcaaacctggcccaccaccgccaaagcccgcagagcggcacaaggacgacagtaggggtcttgtgcttcctgggtacaagtacctcggacccttcaacggactcgacaaaggagagccggtcaacgaggcagacgccgcggccctcgagcacgacaaggcctacgaccggcagctcgacagcggagacaacccgtacctcaagtacaaccacgccgacgcggagtttcaggagcgtcttaaagaagatacgtcttttgggggcaacctcggacgagcagtattccaggcgaaaaagagggttcttgaacctctgggcctggttgaggagcctgttaagacggctccgggaaaaaagaggccggtagagcactctcctgtggagccagactcctcctcgggaaccggaaaagcgggccagcagcctgcaagaaaaagattgaattttggtcagactggagacgcagactccgtacctgacccccagcctctcggacagccaccagcagcccccacaagtttgggatctactacaatggctacaggcagtggcgcaccaatggcagacaataacgagggtgccgatggagtgggtaattcctcaggaaattggcattgcgattcccaatggctgggcgacagagtcatcaccaccagcacccgaacctgggccctgcccacctacaacaaccacctctacaagcaaatctccagccaatcaggagcatcgaacgacaaccactactttggccacagcaccccttgggggtattttgacttcaacagattccactgtcacttctccccacgtgactggcaaagactcatcaacaacaactggggattccgacccaagagactcaacttcaagctctttaacattcaagtcaaagaggtcacgcagaatgacggtacgacgacgattgccaataaccttaccagcacggttcaggtgtttactgactcggagtaccagctcccgtacgtcctcggctcggcgcatcaaggatgcctcccgccgttcccagcagacgtcttcatggtcccacagtatggatacctcaccctgaacaacgggagtcaggcggtaggacgctcttccttttactgcctggagtactttccttctcagatgcttcgtaccggaaacaactttaccttcagctacacctttgaagacgtgcctttccacagtagctacgctcacagccagagtctggatcggctgatgaatcctcttatcgaccagtacctgtattatctaaacaaaacacaatcaaatagtggaactcttcagcagtctcggctactgtttagtcaagctggacccaccagcatgtctcttcaagctaaaaactggctgcctggaccttgctacagacaacagcgtctgtcaaagcaggcaaacgacaacaacaacagcaactttccctggactgcggctacaaagtatcatctaaatggccgggactcgttggttaatccaggaccagctatggccagccacaaagacgatgaagaaaagtttttccccatgcatggaaccctgatatttggtaaacaaggaacaaatgctaacgacgcggatttggacaatgtcatgattacagatgaagaagaaatccgcaccaccaatcccgtggctacggagcagtacgggactgtgtcaaataatttgcaaaactcaaatactggtccaactactggaactgtcaatcgccaaggagcgttacctggtatggtgtggcaggatcgagacgtgtacctgcagggacccatttgggccaagattcctcacaccgatggacactttcatccttctccactgatgggaggttttggactcaaacacccgcctcctcagatcatgatcaaaaacactcccgttccagccaatcctcctacaaacttcagttctgccaagtttgcttccttcatcacacagtattccacgggacaagtcagcgtggagattgagtgggagctgcagaaggagaacagcaaacgctggaaccccgagatccagtacacttccaactacaacaaatctgttaatgtggactttactgtggacactaatggcgtgtattcagagcctcgccccattggcaccagatacctgactcgtaatctgtaa

SEQ ID NO: 4530 - DNA, 2208 bp, Artificial Sequence
  source: /note="Description of Artificial Sequence: Synthetic polynucleotide"
atggctgccgatggttatcttccagattggctcgaggacactctctctgaaggaataagacagtggtggaagctcaaacctggcccaccaccgccaaagcccgcagagcggcacaaggacgacagtaggggtcttgtgcttcctgggtacaagtacctcggacccttcaacggactcgacaaaggagagccggtcaacgaggcagacgccgcggccctcgagcacgacaaggcctacgaccggcagctcgacagcggagacaacccgtacctcaagtacaaccacgccgacgcggagtttcaggagcgtcttaaagaagatacgtcttttgggggcaacctcggacgagcagtattccaggcgaaaaagagggttcttgaacctctgggcctggttgaggagcctgttaagacggctccgggaaaaaagaggccggtagagcactctcctgtggagccagactcctcctcgggaaccggaaaagcgggccagcagcctgcaagaaaaagattgaattttggtcagactggagacgcagactccgtacctgacccccagcctctcggacagccaccagcagcccccacaagtttgggatctactacaatggctacaggcagtggcgcaccaatggcagacaataacgagggtgccgatggagtgggtaattcctcaggaaattggcattgcgattcccaatggctgggcgacagagtcatcaccaccagcacccgaacctgggccctgcccacctacaacaaccacctctacaagcaaatctccagccaatcaggagcatcgaacgacaaccactactttggccacagcaccccttgggggtattttgacttcaacagattccactgtcacttctccccacgtgactggcaaagactcatcaacaacaactggggattccgacccaagagactcaacttcaagctctttaacattcaagtcaaagaggtcacgcagaatgacggtacgacgacgattgccaataaccttaccagcacggttcaggtgtttactgactcggagtaccagctcccgtacgtcctcggctcggcgcatcaaggatgcctcccgccgttcccagcagacgtcttcatggtcccacagtatggatacctcaccctgaacaacgggagtcaggcggtaggacgctcttccttttactgcctggagtactttccttctcagatgcttcgtaccggaaacaactttaccttcagctacacctttgaagacgtgcctttccacagtagctacgctcacagccagagtctggatcggctgatgaatcctcttatcgaccagtacctgtattatctaaacaaaacacaatcaaatagtggaactcttcagcagtctcggctactgtttagtcaagctggacccaccagcatgtctcttcaagctaaaaactggctgcctggaccttgctacagacaacagcgtctgtcaaagcaggcaaacgacaacaacaacggcaactttccctggactgcggctacaaagtatcatctaaatggccgggactcgttggttaatccaggaccagctatggccagccacaaagacgatgaagaaaagtttttccccatgcatggaaccctgatatttggtaaacaaggaacaaatgctaacgacgcggatttggacaatgtcatgattacagatgaagaagaaatccgcaccaccaatcccgtggctacggagcagtacgggactgtgtcaaataatttgcaaaactcaaatactggtccaactactggaactgtcaatcaccaaggagcgttacctggtatggtgtggcaggatcgagacgtgtacctgcagggacccatttgggccaagattcctcacaccgatggacactttcatccttctccactgatgggaggttttggactcaaacacccgcctcctcagatcatgatcaaaaacactcccgttccagccaatcctcctacaaacttcagttctgccaagtttgcttccttcatcacacagtattccacgggacaagtcagcgtggagattgagtgggagctgcagaaggagaacagcaaacgctggaaccccgagatccagtacacttccaactacaacaaatctgttaatgtggactttactgtggacactaatggcgtgtattcagagcctcgccccattggcaccagatacctgactcgtaatctgtaa

SEQ ID NO: 4531 - DNA, 2208 bp, Artificial Sequence
  source: /note="Description of Artificial Sequence: Synthetic polynucleotide"
atggctgccgatggttatcttccagattggctcgaggacactctctctgaaggaataagacagtggtggaagctcaaacctggcccaccaccgccaaagcccgcagagcggcacaaggacgacagtaggggtcttgtgcttcctgggtacaagtacctcggacccttcaacggactcgacaaaggagagccggtcaacgaggcagacgccgcggccctcgagcacgacaaggcctacgaccggcagctcgacagcggagacaacccgtacctcaagtacaaccacgccgacgcggagtttcaggagcgtcttaaagaagatacgtcttttgggggcaacctcggacgagcagtattccaggcgaaaaagagggttcttgaacctctgggcctggttgaggagcctgttaagacggctccgggaaaaaagaggccggtagagcactctcctgtggagccagactcctcctcgggaaccggaaaagcgggccagcagcctgcaagaaaaagattgaattttggtcagactggagacgcagactccgtacctgacccccagcctctcggacagccaccagcagcccccacaagtttgggatctactacaatggctacaggcagtggcgcaccaatggcagacaataacgagggtgccgatggagtgggtaattcctcaggaaattggcattgcgattcccaatggctgggcgacagagtcatcaccaccagcacccgaacctgggccctgcccacctacaacaaccacctctacaagcaaatctccagccaatcaggagcatcgaacgacaaccactactttggccacagcaccccttgggggtattttgacttcaacagattccactgtcacttctccccacgtgactggcaaagactcatcaacaacaactggggattccgacccaagagactcaacttcaagctctttaacattcaagtcaaagaggtcacgcagaatgacggtacgacgacgattgccaataaccttaccagcacggttcaggtgtttactgactcggagtaccagctcccgtacgtcctcggctcggcgcatcaaggatgcctcccgccgttcccagcagacgtcttcatggtcccacagtatggatacctcaccctgaacaacgggagtcaggcggtaggacgctcttccttttactgcctggagtactttccttctcagatgcttcgtaccggaaacaactttaccttcagctacacctttgaagacgtgcctttccacagtagctacgctcacagccagagtctggatcggctgatgaatcctcttatcgaccagtacctgtattatctaaacaaaacacaatcaaatagtggaactcttcagcagtctcggctactgtttagtcaagctggacccaccagcatgtctcttcaagctaaaaactggctgcctggaccttgctacagacaacagcgtctgtcaaagcaggcaaacgacaacaacaacagcaactttccctggactgcggctacaaagtatcatctaaatggccgggactcgttggttaatccaggaccagctatggccagccacaaagacgatgaagaaaagtttttccccatgcatggaaccctgatatttggtaaacaaggaacaaatgctaacgacgcggatttggacaatgtcatgattacagatgaagaagaaatccgcaccaccaatcccgtggctacggagcagtacgggactgtgtcaaataatttgcaaaactcaaatactggtccaactactggaactgtcaatcaccaaggagcgttacctggtatggtgtggcaggatcgagacgtgtacctgcagggacccatttgggccaagattcctcacaccgatggacactttcatccttctccactgatgggaggttttggactcaaacacccgcctcctcagatcatgatcaaaaacactcccgttccagccaatcctcctacaaacttcagttctgccaagtttgcttccttcatcacacagtattccacgggacaagtcagcgtggagattgagtgggagctgcagaaggagaacggcaaacgctggaaccccgagatccagtacacttccaactacaacaaatctgttaatgtggactttactgtggacactaatggcgtgtattcagagcctcgccccattggcaccagatacctgactcgtaatctgtaa

SEQ ID NO: 4532 - DNA, 2208 bp, Artificial Sequence
  source: /note="Description of Artificial Sequence: Synthetic polynucleotide"
atggctgccgatggttatcttccagattggctcgaggacgctctctctgaaggaataagacagtggtggaagctcaaacctggcccaccaccgccaaagcccgcagagcggcacaaggacgacagtaggggtcttgtgcttcctgggtacaagtacctcggacccttcaacggactcgacaaaggagagccggtcaacgaggcagacgccgcggccctcgagcacgacaaggcctacgaccggcagctcgacagcggagacaacccgtacctcaagtacaaccacgccgacgcggagtttcaggagcgtcttaaagaagatacgtcttttgggggcaacctcggacgagcagtattccaggcgaaaaagagggttcttgaacctctgggcctggttgaggagcctgttaagacggctccgggaaaaaagaggccggtagagcactctcctgtggagccagactcctcctcgggaaccggaaaagcgggccagcagcctgcaagaaaaagattgaattttggtcagactggagacgcagactccgtacctgacccccagcctctcggacagccaccagcagcccccacaagtttgggatctactacaatggctacaggcagtggcgcaccaatggcagacaataacgagggtgccgatggagtgggtaattcctcaggaaattggcattgcgattcccaatggctgggcgacagagtcatcaccaccagcacccgaacctgggccctgcccacctacaacaaccacctctacaagcaaatctccagccaatcaggagcatcgaacgacaaccactactttggccacagcaccccttgggggtattttgacttcaacagattccactgtcacttctccccacgtgactggcaaagactcatcaacaacaactggggattccgacccaagagactcaacttcaagctctttaacattcaagtcaaagaggtcacgcagaatgacggtacgacgacgattgccaataaccttaccagcacggttcaggtgtttactgactcggagtaccagctcccgtacgtcctcggctcggcgcatcaaggatgcctcccgccgttcccagcagacgtcttcatggtcccacagtatggatacctcaccctgaacaacgggagtcaggcggtaggacgctcttccttttactgcctggagtactttccttctcagatgcttcgtaccggaaacaactttaccttcagctacacctttgaagacgtgcctttccacagtagctacgctcacagccagagtctggatcggctgatgaatcctcttatcgaccagtacctgtattatctaaacaaaacacaatcaaatagtggaactcttcagcagtctcggctactgtttagtcaagctggacccaccagcatgtctcttcaagctaaaaactggctgcctggaccttgctacagacaacagcgtctgtcaaagcaggcaaacgacaacaacaacagcaactttccctggactgcggctacaaagtatcatctaaatggccgggactcgttggttaatccaggaccagctatggccagccacaaagacgatgaagaaaagtttttccccatgcatggaaccctgatatttggtaaacaaggaacaaatgctaacgacgcggatttggacaatgtcatgattacagatgaagaagaaatccgcaccaccaatcccgtggctacggagcagtacgggactgtgtcaaataatttgcaaaactcaaatactggtccaactactggaactgtcaatcaccaaggagcgttacctggtatggtgtggcaggatcgagacgtgtacctgcagggacccatttgggccaagattcctcacaccgatggacactttcatccttctccactgatgggaggttttggactcaaacacccgcctcctcagatcatgatcaaaaacactcccgttccagccaatcctcctacaaacttcagttctgccaagtttgcttccttcatcacacagtattccacgggacaagtcagcgtggagattgagtgggagctgcagaaggagaacagcaaacgctggaaccccgagatccagtacacttccaactacaacaaatctgttaatgtggactttactgtggacactaatggcgtgtattcagagcctcgccccattggcaccagatacctgactcgtaatctgtaa

SEQ ID NO: 4533 - DNA, 2208 bp, Artificial Sequence
  source: /note="Description of Artificial Sequence: Synthetic polynucleotide"
atggctgccgatggttatcttccagattggctcgaggacactctctctgaaggaataagacagtggtggaagctcaaacctggcccaccaccgccaaagcccgcagagcggcacaaggacgacagtaggggtcttgtgcttcctgggtacaagtacctcggacccttcaacggactcgacaaaggagagccggtcaacgaggcagacgccgcggccctcgagcacgacaaggcctacgaccggcagctcgacagcggagacaacccgtacctcaagtacaaccacgccgacgcggagtttcaggagcgtcttaaagaagatacgccttttgggggcaacctcggacgagcagtattccaggcgaaaaagagggttcttgaacctctgggcctggttgaggagcctgttaagacggctccgggaaaaaagaggccggtagagcactctcctgtggagccagactcctcctcgggaaccggaaaagcgggccagcagcctgcaagaaaaagattgaattttggtcagactggagacgcagactccgtacctgacccccagcctctcggacagccaccagcagcccccacaagtttgggatctactacaatggctacaggcagtggcgcaccaatggcagacaataacgagggtgccgatggagtgggtaattcctcaggaaattggcattgcgattcccaatggctgggcgacagagtcatcaccaccagcacccgaacctgggccctgcccacctacaacaaccacctctacaagcaaatctccagccaatcaggagcatcgaacgacaaccactactttggccacagcaccccttgggggtattttgacttcaacagattccactgtcacttctccccacgtgactggcaaagactcatcaacaacaactggggattccgacccaagagactcaacttcaagctctttaacattcaagtcaaagaggtcacgcagaatgacggtacgacgacgattgccaataaccttaccagcacggttcaggtgtttactgactcggagtaccagctcccgtacgtcctcggctcggcgcatcaaggatgcctcccgccgttcccagcagacgtcttcatggtcccacagtatggatacctcaccctgaacaacgggagtcaggcggtaggacgctcttccttttactgcctggagtactttccttctcagatgcttcgtaccggaaacaactttaccttcagctacacctttgaagacgtgcctttccacagtagctacgctcacagccagagtctggatcggctgatgaatcctcttatcgaccagtacctgtattatctaaacaaaacacaatcaaatagtggaactcttcagcagtctcggctactgtttagtcaagctggacccaccagcatgtctcttcaagctaaaaactggctgcctggaccttgctacagacaacagcgtctgtcaaagcaggcaaacgacaacaacaacagcaactttccctggactgcggctacaaagtatcatctaaatggccgggactcgttggttaatccaggaccagctatggccagccacaaagacgatgaagaaaagtttttccccatgcatggaaccctgatatttggtaaacaaggaacaaatgctaacgacgcggatttggacaatgtcatgattacagatgaagaagaaatccgcaccaccaatcccgtggctacggagcagtacgggactgtgtcaaataatttgcaaaactcaaatactggtccaactactggaactgtcaatcaccaaggagcgttacctggtatggtgtggcaggatcgagacgtgtacctgcagggacccatttgggccaagattcctcacaccgatggacactttcatccttctccactgatgggaggttttggactcaaacacccgcctcctcagatcatgatcaaaaacactcccgttccagccaatcctcctacaaacttcagttctgccaagtttgcttccttcatcacacagtattccacgggacaagtcagcgtggagattgagtgggagctgcagaaggagaacagcaaacgctggaaccccgagatccagtacacttccaactacaacaaatctgttaatgtggactttactgtggacactaatggcgtgtattcagagcctcgccccattggcaccagatacctgactcgtaatctgtaa

SEQ ID NO: 4534 - protein, 743 aa, Artificial Sequence
  source: /note="Description of Artificial Sequence: Synthetic polypeptide"
MAADGYLPDWLEDNLSEGIREWWALKPGAPQPKANQQHQDNARGLVLPGYKYLGPGNGLDKGEPVNAADAAALEHDKAYDQQLKAGDNPYLKYNHADAEFQERLKEDTSFGGNLGRAVFQAKKRLLEPLGLVEEAAKTAPGKKRPVEQSPQEPDSSAGIGKSGAQPAKKRLNFGQTGDTESVPDPQPIGEPPAAPSGVGSLTMASGGGAPVADNNEGADGVGSSSGNWHCDSQWLGDRVITTSTRTWALPTYNNHLYKQISNSTSGGSSNDNAYFGYSTPWGYFDFNRFHCHFSPRDWQRLINNNWGFRPKRLNFKLFNIQVKEVTDNNGVKTIANNLTSTVQVFTDSDYQLPYVLGSAHEGCLPPFPADVFMIPQYGYLTLNDGSQAVGRSSFYCLEYFPSQMLRTGNNFQFSYEFENVPFHSSYAHSQSLDRLMNPLIDQYLYYLSKTINGSGQNQQTLKFSVAGPSNMAVQGRNYIPGPSYRQQRVSTTVTQNNNSEFAWPGASSWALNGRNSLMNPGPAMASHKEGEDRFFPLSGSLIFGKQGTGRDNVDADKVMITNEEEIKTTNPVATESYGQVATNHQSAQTLAVPFKAQAQTGWVQNQGILPGMVWQDRDVYLQGPIWAKIPHTDGNFHPSPLMGGFGMKHPPPQILIKNTPVPADPPTAFNKDKLNSFITQYSTGQVSVEIEWELQKENSKRWNPEIQYTSNYYKSNNVEFAVNTEGVYSEPRPIGTRYLTRNL

SEQ ID NO: 4535 - protein, 5 aa, Artificial Sequence
  source: /note="Description of Artificial Sequence: Synthetic peptide"
GGGGS

SEQ ID NO: 4536 - protein, 6 aa, Artificial Sequence
  source: /note="Description of Artificial Sequence: Synthetic peptide"
SGGGGS

SEQ ID NO: 4537 - protein, 15 aa, Artificial Sequence
  source: /note="Description of Artificial Sequence: Synthetic peptide"
GGGGSGGGGSGGGGS

SEQ ID NO: 4538 - protein, 25 aa, Artificial Sequence
  source: /note="Description of Artificial Sequence: Synthetic peptide"
GGGGSGGGGSGGGGSGGGGSGGGGS

SEQ ID NO: 4539 - protein, 10 aa, Artificial Sequence
  source: /note="Description of Artificial Sequence: Synthetic peptide"
GGGGSGGGGS

SEQ ID NO: 4540 - protein, 20 aa, Artificial Sequence
  source: /note="Description of Artificial Sequence: Synthetic peptide"
GGGGSGGGGSGGGGSGGGGS

SEQ ID NO: 4541 - protein, 30 aa, Artificial Sequence
  source: /note="Description of Artificial Sequence: Synthetic polypeptide"
GGGGSGGGGSGGGGSGGGGSGGGGSGGGGS

SEQ ID NO: 4542 - protein, 40 aa, Artificial Sequence
  source: /note="Description of Artificial Sequence: Synthetic polypeptide"
GGGGSGGGGSGGGGSGGGGSGGGGSGGGGSGGGGSGGGGS

SEQ ID NO: 4543 - DNA, 11 bp, Artificial Sequence
  source: /note="Description of Artificial Sequence: Synthetic oligonucleotide"
gaggagccacc

SEQ ID NO: 4544 - protein, 50 aa, Artificial Sequence
  source: /note="Description of Artificial Sequence: Synthetic polypeptide"
  SITE (1)..(50): /note="This sequence may encompass 1-10 'Gly Gly Gly Gly Ser' repeating units"
GGGGSGGGGSGGGGSGGGGSGGGGSGGGGSGGGGSGGGGSGGGGSGGGGS

SEQ ID NO: 4545 - protein, 4 aa, Unknown
  source: /note="Description of Unknown: 'KDEL' ER retention motif"
KDEL

SEQ ID NO: 4546 - protein, 6 aa, Unknown
  source: /note="Description of Unknown: 'SEKDEL' ER retention motif"
SEKDEL
